United States Patent Application Publication US 2026/0265747 A1, published September 10, 2026 (application 19/454,946).

The application's sequence listing, which the Patent Office published only in electronic form, follows.

SEQUENCE LISTING (811 sequences)

SEQ ID NO: 1 - DNA, 7332 bp, Homo sapiens
  source 1..7332: mol_type = genomic DNA
gtgagtttgggcccgctgcagctccctgtcccggcgggtcccaggctacggcggggatggcggtaaccctgcagcctgcgggccggcgacacgaacccccggccccgcagagacagagtgacccagcaacccagagcccatgagggacacccgccccctcctggggcgaggccttcccccacttcagccccgctccctcacttgggtcttcccttgtcctctcgcgaggggaggcagagccttgttggggcctgtcctgaattcaccgaggggagtcacggcctcagccctctcgcccttcgcaggatgcgaagagttggggcgagaacttgtttctttttatttgcgagaaaccagggcgggggttcttttaactgcgttgtgaagagaacttggaggagccgagatttgctcagtgccacttccctcttctagtctgagagggaagagggctgggggcgcgggacacttcgagaggaggcggggtttggagctggagagatgtgggggcagtggatgacataatgcttttaggacgcctcggcgggagtggcggggcagggggggggcggggagtgagggcgcgtccaatgggagatttcttttcctagtggcacttaaaacagcctgagatttgaggctcttcctacattgtcaggacatttcatttagttcatgatcacggtggtagtaacacgattttaagcaccacctaagagatctgctcatctaagcctaagttggtctgcaggcgtttgaatgagttgtggttgccaagtaaagtggtgaacttacgtggtgattaatgaaattatcttaaatattaggaagagttgattgaagttttttgcctatgtgtgttgggaataaaaccaacacgttgctgatggggaggttaattgccgagggatgaatgaggtgtacattttaccagtattccagtcaggcttgccagaatacggggggtccgcagactccgtgggcatctcagatgtgccagtgaaagggtttctgtttgcttcattgctgacagcttgttactttttggaagctaggggtttctgttgcttgttcttggggagaatttttgaaacaggaaaagagagaccattaaaacatctagcggaaccccaggactttccctggaagtctgtgtgtcgagtgtacagtaggagttaggaagtactctggtgcagttcaggcctttctcttacctctcagtattctatttccgatctggatgtgtcccagatggcatttggtaagaatatctctgttaagactgattaatttttagtaatatttcttgttctttgtttctgttatgatccttgtctcgtcttcaaagtttaattagaaaatgattcggagagcagtgttagcttatttgttggaataaaatttaggaataaattattctaaaggatggaaaaactttttggatatttggagaaattttaaaacaatttggcttatctcttcagtaagtaatttctcatccagaaatttactgtagtgcttttctaggaggtaggtgtcataaaagttcacacattgcatgtatcttgtgtaaacactaaacagggctcctgatgggaaggaagacctttctgctgggctgcttcagacacttgatcattctaaaaatatgccttctctttcttatgctgatttgacagaacctgcatttgcttatcttcaaaatatgggtatcaagaaatttcctttgctgccttgacaaaggagatagattttgtttcattactttaaggtaatatatgattaccttatttaaaaaatttaatcaggactggcaaggtggcttacacctttaatccgagcactttgggaggcctaggtggacgaatcacctgaggtcaggagtttgagaccagcctggctaacatggtgaaaccctgtctctactaaaaatacaaaaattagctggtcatggtggcacgtgcctgtaatccaagctacctgggaggctgaggcaggaaaatcgcttgaacccgggaggcagagtctgcagtgagttgagatcacgccactgcactccagcctgggtgacagagcgagactctatctcaaaaaaaattttttttaatgtattatttttgcataagtaatacattgacatgatacaaattctgtaattacaaaagggcaataattaaaatatcttccttccacccctttcctctgagtacctaactttgtccccaagaacaagcactatttcagttcctcatgtatcctgccagatataacctgttcatattgtaagatagatttaaaatgctctaaaaacaaaagtagtttagaataatatatatctatatattttttgagatgtagtctcacattgtcacccaggctggagtgcagtgatacaatctcggctcactgcagtctctgcctcccaggttcaaatgcttctcctgcctcagccttctgagtagctgggattacaggcgcccaccaccatgtccagctaatttttgtatttttagtagagatggggtttcaccatgttggccaggctggtcttgaactcctgaccttgtgatctgtccacctcggcctcccaaagtgctgggattacaggtgtgagccaccatgcctggctagaataataacttttaaaggttcttagcatgctctgaaatcaactgcattaggtttatttatagttttatagttattttaaataaaatgcatatttgtcatatttctctgtattttgctgttgagaaaggaggtattcactaattttgagtaacaaacactgctcacaaagtttggattttggcagttctgttcacgtgcttcagccaaaaaatcctcttctcaaagtaagattgatgaaagcaatttagaaagtatctgttctgtttttatggctcttgctctttggtgtggaactgtggtgtcacgccatgcatgggcctcagtttatgagtgtttgtgctctgctcagcatacaggatgcaggagttccttatggggctggctgcaggctcagcaaatctagcatgcttgggagggtcctcacagtaattaggaggcaattaatacttgcttctggcagtttcttattctccttcagattcctatctggtgtttccctgactttattcattcatcagtaaatatttactaaacatgtactatgtgcctggcactgttataggtgcagggctcagcagtgagcagacaaagctctgccctcgtgaagctttcattctaatgaaggacatagacagtaagcaagatagataagtaaaatatacagtacgttaatacgtggaggaacttcaaagcagggaaggggatagggaaatgtcagggttaatcgagtgttaacttatttttatttttaaaaaaattgttaagggctttccagcaaaacccagaaagcctgctagacaaattccaaaagagctgtagcactaagtgttgacatttttattttattttgttttgttttgttttttttgagacagttcttgctctatcagccaggctggagtgcactagtgtgatcttggctcactgcaacctctgcctcttgggttcaagtgattctcatgcctcagcctcctgtttagctgggattatagacatgcactgccatgcctgggtaattttttttttttcccccgagacggagtcttgctctgtcgcccaggctggagtgcagtggcgcgatctcagctcactgcaagctccgcttcccgagttcacgccattctcctgcctcagtctcccaagtagctgggactacaggcgcctgccaccacgtccagctaatttttttgtatttttaatagagacggggtttcaccgtgttagccaggatgatcttgatctcctgacctcgtcatccgccgaccttgtgatccgcccacctcggcctcccaaagtgctgggattacaggcatgagccactgtgcccggccacgcctgggtaatttttgtatttttagtagagatggggttttgccatgatgagcaggctggtctcgaactcccggcctcatgtgatctgcctgccttggcctcccaaagtgctaggattacaggcatgagccaccatacctggccagtgttgatattttaaatacggtgttcagggaaggtccactgagaagacagctttttttttttttttttttggggttggggggcaaggtcttgctctttaacccaggctggaatgcagtatcactatcgtagctcacttcagccttgaactcctgggctcaagtgatcctcccacctcaacctcacaatgtgttgggactataggtgtgagccatcacacctggccagatgatggcttttgagtaaagacctcaagcgagttaagagtctagtgtaagggtgtatgaagtagtggtattccagatggggggaacaggtccaaaatcttcctgtttcaggaatagcaaggatgtcattttagttgggtgaattgagtgagggggacatttgtagtaagaagtaaggtccaagaggtcaagggagtgccatatcagaccaatactacttgccttgtagatggaataaagatattggcatttatgtgagtgagatgggatgtcactggaggattagagcagaggagtagcatgatctgaatttcaatcttaagtgaactctggctgacaacagagtgaaggggaacaccggcaaaagcagaaaccagttaggaagccactgcagtgctcagataagcatggtgggttctgtcagggtaccggctgtcggctgtgggcagtgtgaggaatgactgactggattttgaatgcggaaccaactgcacttgttgaactctgctaagtataacaatttagcagtagcttgcgttatcaggtttgtattcagctgcaagtaacagaaaatcctgctgcaatagcttaaactggtaacaagcaagagcttatcagaagacaaaaataagtctggggaaattcaacaataagttaaggaacccaggctctttcttttttttttttttgaaacggagtttcgctcttgtcacccgggctggagtgcaatgatgtgatctcagctcactaaaacctctacctcctgggttcaagtgattcttctgcctcagcctcccaagtaactgggattacaggcgtataccaccatgcccagctaatttttgtgtttttagtagagatggggtttcaccatgttggccaggctggtctcgaacttctgacctcaggtgatccactcgcctcagcctgccaaagtgctgggattacaggtttgggccactgcacccggtcagaacccaggctctttcttatacttaccttgcaaacccttgttctcattttttccctttgtatttttattgttgaattgtaatagttctttatatattctggatactggattcttatcagatagatgatttgtaaaaactctcccttcctttggattgtctttttactttcttgatagtgtcttttgaagtgtaaaagtttttaattttgatgaagtcgagtttatctattttgtctttggttgctgtgcttcaagtgtcatatctaagaaatcattgtctaatccaaagtcaaaaaggtttactcctatgttttcttctaagaattttagagttttacatttaagtctgatccattttgagttaatttttatatatggttcaggtagaagtccaactttattcttttccatgtggttattcagttgtcccagcactgtttgttgaagagactattctttccccatggaattatcttagtacccttgttgaaaattaatcgtccttaattgtataaatttatttctagactgtcagttctacctgttggtctttatgtcgatcctgtgccagtaccatacagtcttgattactgaagtttgtgtcacagtttaaattcatgaaatgtgagttctccaactttgttccttttcaagattgatttggccatgctgggtcccttgcatttccgtacgaattgtaggatcagcttgtcagtttcaacaaagaagccaagtaggattctgagagggattgtgttgaatctgtagatcaacttggggagtattcgcatcttaacaatattgtcttccacctatgaacatgggcaaactttgtgtaaatggtcagattgtaagtatttcgggctgtgtgggcacagtgtctctgtcacagctacgcggctctgccattgtagcatgaaagtagccataagcaatatgtatgagtgtctgtgttccaatagaattttattaatgacaaggaagtttgaatttcatataattttcacctgtcatgagatagtatttgattattttggtcaaccatttaaaaatgtaaaaacatttcttagcttgtgaactagccaaaaatatgcaggttatagttttcccactcctaggttaaaatatgataggaccacatttggaaagcatttctttttttttttttttttttttttttgagacggagtttcactcttgttgcccaggctggagtgcagtggcgcgatctcggctcactgcaacctctgcctcccaggttcaagacattctcctgcacggcctccctagtagctgggattacaggcatgcgccaccacacccagctaattttgtatttttagtagagacggggtttctccatgttggtcaggctggtcttgaactcctgacctcaggtgatccacccgcctcagcctcccaaagtgctgggattacagggtgtgagccaccacaccctgctggaaagcatttcttttttggctgtttttgttttttttttaaactagttttgaaaattataaaagttacacatatacattataaaaatatcttcaagcagcacagatgaaaaacaaagcccttcttgcaagtctgtcatctttgtctaacttcctaagaacaaaagtgtttcttgtgtcttcttcccagattttaatatgcatatacaagcatttaaatgtgtcattttttgtttgcttgactgagatcacattacatatgtatttttttacttaacaatgtgtcatagatattgttccatagcagtacctgtaattcttattaattgctatgtaatattttagaatttctttttaaaagaggacttttggagatgtaaaggcaaaggtctcacatttttgtggctgtagaatgtgctggtgacatattctctctaccttgagaagtccccatccccatcacctccatttcctgtaaataagtcaaccacttgataaactacctttgaatggatccacactcaaaacatttagtcttattcagacaacaaggaggaaaaataaa

SEQ ID NO: 2 - RNA, 45 nt, Homo sapiens
  source 1..45: mol_type = mRNA
cctacattgtcaggacatttcatttagttcatgatcacggtggta

SEQ ID NO: 3 - RNA, 45 nt, Homo sapiens
  source 1..45: mol_type = mRNA
agcctaagttggtctgcaggcgtttgaatgagttgtggttgccaa

SEQ ID NO: 4 - RNA, 45 nt, Homo sapiens
  source 1..45: mol_type = mRNA
ggagtgcaatgatgtgatctcagctcactaaaacctctacctcct

SEQ ID NO: 5 - RNA, 45 nt, Homo sapiens
  source 1..45: mol_type = mRNA
tggccatgctgggtcccttgcatttccgtacgaattgtaggatca

SEQ ID NO: 6 - RNA, 45 nt, Homo sapiens
  source 1..45: mol_type = mRNA
tgtatgagtgtctgtgttccaatagaattttattaatgacaagga

SEQ ID NO: 7 - RNA, 45 nt, Homo sapiens
  source 1..45: mol_type = mRNA
tgagaagtccccatccccatcacctccatttcctgtaaataagtc

SEQ ID NO: 8 - RNA, 40 nt, Mus sp.
  source 1..40: mol_type = mRNA
cgtttcatttagtttgtggtgtagtgtagttaaaccaggt

SEQ ID NO: 9 - RNA, 40 nt, Mus sp.
  source 1..40: mol_type = mRNA
ttcatttagtttgtggtgtagtgtagttaaaccaggtttt

SEQ ID NO: 10 - RNA, 40 nt, Mus sp.
  source 1..40: mol_type = mRNA
cagttggatgagttgtatttgtcaagtacatggtgagtta

SEQ ID NO: 11 - RNA, 20 nt, Homo sapiens
  source 1..20: mol_type = mRNA
catttcatttagttcatgat

SEQ ID NO: 12 - RNA, 20 nt, Homo sapiens
  source 1..20: mol_type = mRNA
gcaggcgtttgaatgagttg

SEQ ID NO: 13 - RNA, 20 nt, Homo sapiens
  source 1..20: mol_type = mRNA
gatctcagctcactaaaacc

SEQ ID NO: 14 - RNA, 20 nt, Homo sapiens
  source 1..20: mol_type = mRNA
ccttgcatttccgtacgaat

SEQ ID NO: 15 - RNA, 20 nt, Homo sapiens
  source 1..20: mol_type = mRNA
gttccaatagaattttatta

SEQ ID NO: 16 - RNA, 20 nt, Homo sapiens
  source 1..20: mol_type = mRNA
cccatcacctccatttcctg

SEQ ID NO: 17 - RNA, 20 nt, Mus sp.
  source 1..20: mol_type = mRNA
gtggtgtagtgtagttaaac

SEQ ID NO: 18 - RNA, 20 nt, Mus sp.
  source 1..20: mol_type = mRNA
gtgtagtgtagttaaaccag

SEQ ID NO: 19 - RNA, 20 nt, Mus sp.
  source 1..20: mol_type = mRNA
tatttgtcaagtacatggtg

SEQ ID NO: 20 - RNA, 20 nt, synthetic construct
  misc_feature 1..20: note = Description of Artificial Sequence: Synthetic oligonucleotide
  source 1..20: mol_type = other RNA
gcctgtcctgaattcaccga

SEQ ID NO: 21-66 - skipped (46 entries)

SEQ ID NO: 67 - RNA, 20 nt, synthetic construct
  misc_feature 1..20: note = Description of Artificial Sequence: Synthetic oligonucleotide
  source 1..20: mol_type = other RNA
gctagaatgtatgttagaga

SEQ ID NO: 68 - RNA, 15 nt, synthetic construct
  misc_feature 1..15: note = Description of Artificial Sequence: Synthetic oligonucleotide
  source 1..15: mol_type = other RNA
catttagttcatgaa

SEQ ID NO: 69-72 - skipped (4 entries)

SEQ ID NO: 73 - RNA, 15 nt, synthetic construct
  misc_feature 1..15: note = Description of Artificial Sequence: Synthetic oligonucleotide
  source 1..15: mol_type = other RNA
cacctccatttccta

SEQ ID NO: 74 - RNA, 15 nt, synthetic construct
  misc_feature 1..15: note = Description of Artificial Sequence: Synthetic oligonucleotide
  source 1..15: mol_type = other RNA
tgcgaagttagggaa

SEQ ID NO: 75-85 - skipped (11 entries)

SEQ ID NO: 86 - RNA, 15 nt, synthetic construct
  misc_feature 1..15: note = Description of Artificial Sequence: Synthetic oligonucleotide
  source 1..15: mol_type = other RNA
ggcgtttcatttaga

SEQ ID NO: 87-96 - skipped (10 entries)

SEQ ID NO: 97 - RNA, 15 nt, synthetic construct
  misc_feature 1..15: note = Description of Artificial Sequence: Synthetic oligonucleotide
  source 1..15: mol_type = other RNA
tatttgtcaagtaca

SEQ ID NO: 98 - RNA, 15 nt, synthetic construct
  misc_feature 1..15: note = Description of Artificial Sequence: Synthetic oligonucleotide
  source 1..15: mol_type = other RNA
gtggtgtagtgtaga

SEQ ID NO: 99 - skipped

SEQ ID NO: 100 - RNA, 15 nt, synthetic construct
  misc_feature 1..15: note = Description of Artificial Sequence: Synthetic oligonucleotide
  source 1..15: mol_type = other RNA
tatttgtcaagtaca

SEQ ID NO: 101 - RNA, 20 nt, synthetic construct
  misc_feature 1..20: note = Description of Artificial Sequence: Synthetic oligonucleotide
  source 1..20: mol_type = other RNA
tcggtgaattcaggacaggc

SEQ ID NO: 102 - RNA, 20 nt, synthetic construct
  misc_feature 1..20: note = Description of Artificial Sequence: Synthetic oligonucleotide
  source 1..20: mol_type = other RNA
tagaagagggaagtggcact

SEQ ID NO: 103 - RNA, 20 nt, synthetic construct
  misc_feature 1..20: note = Description of Artificial Sequence: Synthetic oligonucleotide
  source 1..20: mol_type = other RNA
ttgacaatgtaggaagagcc

SEQ ID NO: 104 - RNA, 20 nt, synthetic construct
  misc_feature 1..20: note = Description of Artificial Sequence: Synthetic oligonucleotide
  source 1..20: mol_type = other RNA
ttcctgacaatgtaggaaga

SEQ ID NO: 105 - RNA, 20 nt, synthetic construct
  misc_feature 1..20: note = Description of Artificial Sequence: Synthetic oligonucleotide
  source 1..20: mol_type = other RNA
taactaaatgaaatgtcctg

SEQ ID NO: 106 - RNA, 20 nt, synthetic construct
  misc_feature 1..20: note = Description of Artificial Sequence: Synthetic oligonucleotide
  source 1..20: mol_type = other RNA
ttcatgaactaaatgaaatg

SEQ ID NO: 107 - RNA, 20 nt, synthetic construct
  misc_feature 1..20: note = Description of Artificial Sequence: Synthetic oligonucleotide
  source 1..20: mol_type = other RNA
taactcattcaaacgcctgc

SEQ ID NO: 108 - RNA, 20 nt, synthetic construct
  misc_feature 1..20: note = Description of Artificial Sequence: Synthetic oligonucleotide
  source 1..20: mol_type = other RNA
tctggcacatctgagatgcc

SEQ ID NO: 109 - RNA, 20 nt, synthetic construct
  misc_feature 1..20: note = Description of Artificial Sequence: Synthetic oligonucleotide
  source 1..20: mol_type = other RNA
tcactggcacatctgagatg

SEQ ID NO: 110 - RNA, 20 nt, synthetic construct
  misc_feature 1..20: note = Description of Artificial Sequence: Synthetic oligonucleotide
  source 1..20: mol_type = other RNA
tagaacaagcaacagaaacc

SEQ ID NO: 111 - RNA, 20 nt, synthetic construct
  misc_feature 1..20: note = Description of Artificial Sequence: Synthetic oligonucleotide
  source 1..20: mol_type = other RNA
taaatgccatctgggacaca

SEQ ID NO: 112 - RNA, 20 nt, synthetic construct
  misc_feature 1..20: note = Description of Artificial Sequence: Synthetic oligonucleotide
  source 1..20: mol_type = other RNA
tagacgagacaaggatcata

SEQ ID NO: 113 - RNA, 20 nt, synthetic construct
  misc_feature 1..20: note = Description of Artificial Sequence: Synthetic oligonucleotide
  source 1..20: mol_type = other RNA
tacaagatacatgcaatgtg

SEQ ID NO: 114 - RNA, 20 nt, synthetic construct
  misc_feature 1..20: note = Description of Artificial Sequence: Synthetic oligonucleotide
  source 1..20: mol_type = other RNA
ttcagcataagaaagagaag

SEQ ID NO: 115 - RNA, 20 nt, synthetic construct
  misc_feature 1..20: note = Description of Artificial Sequence: Synthetic oligonucleotide
  source 1..20: mol_type = other RNA
tagcaaatgcaggttctgtc

SEQ ID NO: 116 - RNA, 20 nt, synthetic construct
  misc_feature 1..20: note = Description of Artificial Sequence: Synthetic oligonucleotide
  source 1..20: mol_type = other RNA
taagataagcaaatgcaggt

SEQ ID NO: 117 - RNA, 20 nt, synthetic construct
  misc_feature 1..20: note = Description of Artificial Sequence: Synthetic oligonucleotide
  source 1..20: mol_type = other RNA
ttaatgaaacaaaatctatc

SEQ ID NO: 118 - RNA, 20 nt, synthetic construct
  misc_feature 1..20: note = Description of Artificial Sequence: Synthetic oligonucleotide
  source 1..20: mol_type = other RNA
ttcggattaaaggtgtaagc

SEQ ID NO: 119 - RNA, 20 nt, synthetic construct
  misc_feature 1..20: note = Description of Artificial Sequence: Synthetic oligonucleotide
  source 1..20: mol_type = other RNA
tagtagagacagggtttcac

SEQ ID NO: 120 - RNA, 20 nt, synthetic construct
  misc_feature 1..20: note = Description of Artificial Sequence: Synthetic oligonucleotide
  source 1..20: mol_type = other RNA
tttagtagagacagggtttc

SEQ ID NO: 121 - RNA, 20 nt, synthetic construct
  misc_feature 1..20: note = Description of Artificial Sequence: Synthetic oligonucleotide
  source 1..20: mol_type = other RNA
tcccgggttcaagcgatttt

SEQ ID NO: 122 - RNA, 20 nt, synthetic construct
  misc_feature 1..20: note = Description of Artificial Sequence: Synthetic oligonucleotide
  source 1..20: mol_type = other RNA
tagtggcgtgatctcaactc

SEQ ID NO: 123 - RNA, 20 nt, synthetic construct
  misc_feature 1..20: note = Description of Artificial Sequence: Synthetic oligonucleotide
  source 1..20: mol_type = other RNA
tgatagagtctcgctctgtc

SEQ ID NO: 124 - RNA, 20 nt, synthetic construct
  misc_feature 1..20: note = Description of Artificial Sequence: Synthetic oligonucleotide
  source 1..20: mol_type = other RNA
tctggccaacatggtgaaac

SEQ ID NO: 125 - RNA, 20 nt, synthetic construct
  misc_feature 1..20: note = Description of Artificial Sequence: Synthetic oligonucleotide
  source 1..20: mol_type = other RNA
tagttgatttcagagcatgc

SEQ ID NO: 126 - RNA, 20 nt, synthetic construct
  misc_feature 1..20: note = Description of Artificial Sequence: Synthetic oligonucleotide
  source 1..20: mol_type = other RNA
tggctgaagcacgtgaacag

SEQ ID NO: 127 - RNA, 20 nt, synthetic construct
  misc_feature 1..20: note = Description of Artificial Sequence: Synthetic oligonucleotide
  source 1..20: mol_type = other RNA
ttccacaccaaagagcaaga

SEQ ID NO: 128 - RNA, 20 nt, synthetic construct
  misc_feature 1..20: note = Description of Artificial Sequence: Synthetic oligonucleotide
  source 1..20: mol_type = other RNA
ttcctaattactgtgaggac

SEQ ID NO: 129 - RNA, 20 nt, synthetic construct
  misc_feature 1..20: note = Description of Artificial Sequence: Synthetic oligonucleotide
  source 1..20: mol_type = other RNA
tcagggaaacaccagatagg

SEQ ID NO: 130 - RNA, 20 nt, synthetic construct
  misc_feature 1..20: note = Description of Artificial Sequence: Synthetic oligonucleotide
  source 1..20: mol_type = other RNA
tcctgctttgaagttcctcc

SEQ ID NO: 131 - RNA, 20 nt, synthetic construct
  misc_feature 1..20: note = Description of Artificial Sequence: Synthetic oligonucleotide
  source 1..20: mol_type = other RNA
ttaagttaacacttgattaa

SEQ ID NO: 132 - RNA, 20 nt, synthetic construct
  misc_feature 1..20: note = Description of Artificial Sequence: Synthetic oligonucleotide
  source 1..20: mol_type = other RNA
tcaagatcacactagtgcac

SEQ ID NO: 133 - RNA, 20 nt, synthetic construct
  misc_feature 1..20: note = Description of Artificial Sequence: Synthetic oligonucleotide
  source 1..20: mol_type = other RNA
tctggctaacacggtgaaac

SEQ ID NO: 134 - RNA, 20 nt, synthetic construct
  misc_feature 1..20: note = Description of Artificial Sequence: Synthetic oligonucleotide
  source 1..20: mol_type = other RNA
tcctgggttaaagagcaaga

SEQ ID NO: 135 - RNA, 20 nt, synthetic construct
  misc_feature 1..20: note = Description of Artificial Sequence: Synthetic oligonucleotide
  source 1..20: mol_type = other RNA
ttcttaactcgcttgaggtc

SEQ ID NO: 136 - RNA, 20 nt, synthetic construct
  misc_feature 1..20: note = Description of Artificial Sequence: Synthetic oligonucleotide
  source 1..20: mol_type = other RNA
tctaatcctccagtgacatc

SEQ ID NO: 137 - RNA, 20 nt, synthetic construct
  misc_feature 1..20: note = Description of Artificial Sequence: Synthetic oligonucleotide
  source 1..20: mol_type = other RNA
taacaagtgcagttggttcc

SEQ ID NO: 138 - RNA, 20 nt, synthetic construct
  misc_feature 1..20: note = Description of Artificial Sequence: Synthetic oligonucleotide
  source 1..20: mol_type = other RNA
ttgaatacaaacctgataac

SEQ ID NO: 139 - RNA, 20 nt, synthetic construct
  misc_feature 1..20: note = Description of Artificial Sequence: Synthetic oligonucleotide
  source 1..20: mol_type = other RNA
tgttttagtgagctgagatc

SEQ ID NO: 140 - RNA, 20 nt, synthetic construct
  misc_feature 1..20: note = Description of Artificial Sequence: Synthetic oligonucleotide
  source 1..20: mol_type = other RNA
taaggtaagtataagaaaga

SEQ ID NO: 141 - RNA, 20 nt, synthetic construct
  misc_feature 1..20: note = Description of Artificial Sequence: Synthetic oligonucleotide
  source 1..20: mol_type = other RNA
tcaatgatttcttagatatg

SEQ ID NO: 142 - RNA, 20 nt, synthetic construct
  misc_feature 1..20: note = Description of Artificial Sequence: Synthetic oligonucleotide
  source 1..20: mol_type = other RNA
tagaaaacataggagtaaac

SEQ ID NO: 143 - RNA, 20 nt, synthetic construct
  misc_feature 1..20: note = Description of Artificial Sequence: Synthetic oligonucleotide
  source 1..20: mol_type = other RNA
tctgggacaactgaataacc

SEQ ID NO: 144 - RNA, 20 nt, synthetic construct
  misc_feature 1..20: note = Description of Artificial Sequence: Synthetic oligonucleotide
  source 1..20: mol_type = other RNA
tcggaaatgcaagggaccca

SEQ ID NO: 145 - RNA, 20 nt, synthetic construct
  misc_feature 1..20: note = Description of Artificial Sequence: Synthetic oligonucleotide
  source 1..20: mol_type = other RNA
tttcgtacggaaatgcaagg

SEQ ID NO: 146 - RNA, 20 nt, synthetic construct
  misc_feature 1..20: note = Description of Artificial Sequence: Synthetic oligonucleotide
  source 1..20: mol_type = other RNA
taataaaattctattggaac

SEQ ID NO: 147 - RNA, 20 nt, synthetic construct
  misc_feature 1..20: note = Description of Artificial Sequence: Synthetic oligonucleotide
  source 1..20: mol_type = other RNA
taggaaatggaggtgatggg

SEQ ID NO: 148 - RNA, 20 nt, synthetic construct
  misc_feature 1..20: note = Description of Artificial Sequence: Synthetic oligonucleotide
  source 1..20: mol_type = other RNA
tctctaacatacattctagc

SEQ ID NO: 149 - RNA, 20 nt, synthetic construct
  misc_feature 1..20: note = Description of Artificial Sequence: Synthetic oligonucleotide
  source 1..20: mol_type = other RNA
agtgccacttccctcttcta

SEQ ID NO: 150 - RNA, 20 nt, synthetic construct
  misc_feature 1..20: note = Description of Artificial Sequence: Synthetic oligonucleotide
  source 1..20: mol_type = other RNA
ggctcttcctacattgtcag

SEQ ID NO: 151 - RNA, 20 nt, synthetic construct
  misc_feature 1..20: note = Description of Artificial Sequence: Synthetic oligonucleotide
  source 1..20: mol_type = other RNA
tcttcctacattgtcaggac

SEQ ID NO: 152 - RNA, 20 nt, synthetic construct
  misc_feature 1..20: note = Description of Artificial Sequence: Synthetic oligonucleotide
  source 1..20: mol_type = other RNA
caggacatttcatttagttc

SEQ ID NO: 153 - RNA, 20 nt, synthetic construct
  misc_feature 1..20: note = Description of Artificial Sequence: Synthetic oligonucleotide
  source 1..20: mol_type = other RNA
ggcatctcagatgtgccagt

SEQ ID NO: 154 - RNA, 20 nt, synthetic construct
  misc_feature 1..20: note = Description of Artificial Sequence: Synthetic oligonucleotide
  source 1..20: mol_type = other RNA
catctcagatgtgccagtga

SEQ ID NO: 155 - RNA, 20 nt, synthetic construct
  misc_feature 1..20: note = Description of Artificial Sequence: Synthetic oligonucleotide
  source 1..20: mol_type = other RNA
ggtttctgttgcttgttctt

SEQ ID NO: 156 - RNA, 20 nt, synthetic construct
  misc_feature 1..20: note = Description of Artificial Sequence: Synthetic oligonucleotide
  source 1..20: mol_type = other RNA
tgtgtcccagatggcatttg

SEQ ID NO: 157 - RNA, 20 nt, synthetic construct
  misc_feature 1..20: note = Description of Artificial Sequence: Synthetic oligonucleotide
  source 1..20: mol_type = other RNA
tatgatccttgtctcgtctt

SEQ ID NO: 158 - RNA, 20 nt, synthetic construct
  misc_feature 1..20: note = Description of Artificial Sequence: Synthetic oligonucleotide
  source 1..20: mol_type = other RNA
cacattgcatgtatcttgtg

SEQ ID NO: 159 - RNA, 20 nt, synthetic construct
  misc_feature 1..20: note = Description of Artificial Sequence: Synthetic oligonucleotide
  source 1..20: mol_type = other RNA
cttctctttcttatgctgat

SEQ ID NO: 160 - RNA, 20 nt, synthetic construct
  misc_feature 1..20: note = Description of Artificial Sequence: Synthetic oligonucleotide
  source 1..20: mol_type = other RNA
gacagaacctgcatttgctt

SEQ ID NO: 161 - RNA, 20 nt, synthetic construct
  misc_feature 1..20: note = Description of Artificial Sequence: Synthetic oligonucleotide
  source 1..20: mol_type = other RNA
acctgcatttgcttatcttc

SEQ ID NO: 162 - RNA, 20 nt, synthetic construct
  misc_feature 1..20: note = Description of Artificial Sequence: Synthetic oligonucleotide
  source 1..20: mol_type = other RNA
gatagattttgtttcattac

SEQ ID NO: 163 - RNA, 20 nt, synthetic construct
  misc_feature 1..20: note = Description of Artificial Sequence: Synthetic oligonucleotide
  source 1..20: mol_type = other RNA
gcttacacctttaatccgag

SEQ ID NO: 164 - RNA, 20 nt, synthetic construct
  misc_feature 1..20: note = Description of Artificial Sequence: Synthetic oligonucleotide
  source 1..20: mol_type = other RNA
gtgaaaccctgtctctacta

SEQ ID NO: 165 - RNA, 20 nt, synthetic construct
  misc_feature 1..20: note = Description of Artificial Sequence: Synthetic oligonucleotide
  source 1..20: mol_type = other RNA
gaaaccctgtctctactaaa

SEQ ID NO: 166 - RNA, 20 nt, synthetic construct
  misc_feature 1..20: note = Description of Artificial Sequence: Synthetic oligonucleotide
  source 1..20: mol_type = other RNA
aaaatcgcttgaacccggga

SEQ ID NO: 167 - RNA, 20 nt, synthetic construct
  misc_feature 1..20: note = Description of Artificial Sequence: Synthetic oligonucleotide
  source 1..20: mol_type = other RNA
gagttgagatcacgccactg

SEQ ID NO: 168 - RNA, 20 nt, synthetic construct
  misc_feature 1..20: note = Description of Artificial Sequence: Synthetic oligonucleotide
  source 1..20: mol_type = other RNA
gacagagcgagactctatct

SEQ ID NO: 169 - RNA, 20 nt, synthetic construct
  misc_feature 1..20: note = Description of Artificial Sequence: Synthetic oligonucleotide
  source 1..20: mol_type = other RNA
gtttcaccatgttggccagg

SEQ ID NO: 170 - RNA, 20 nt, synthetic construct
  misc_feature 1..20: note = Description of Artificial Sequence: Synthetic oligonucleotide
  source 1..20: mol_type = other RNA
gcatgctctgaaatcaactg

SEQ ID NO: 171 - RNA, 20 nt, synthetic construct
  misc_feature 1..20: note = Description of Artificial Sequence: Synthetic oligonucleotide
  source 1..20: mol_type = other RNA
ctgttcacgtgcttcagcca

SEQ ID NO: 172 - RNA, 20 nt, synthetic construct
  misc_feature 1..20: note = Description of Artificial Sequence: Synthetic oligonucleotide
  source 1..20: mol_type = other RNA
tcttgctctttggtgtggaa

SEQ ID NO: 173 - RNA, 20 nt, synthetic construct
  misc_feature 1..20: note = Description of Artificial Sequence: Synthetic oligonucleotide
  source 1..20: mol_type = other RNA
gtcctcacagtaattaggag

SEQ ID NO: 174 - RNA, 20 nt, synthetic construct
  misc_feature 1..20: note = Description of Artificial Sequence: Synthetic oligonucleotide
  source 1..20: mol_type = other RNA
cctatctggtgtttccctga

SEQ ID NO: 175 - RNA, 20 nt, synthetic construct
  misc_feature 1..20: note = Description of Artificial Sequence: Synthetic oligonucleotide
  source 1..20: mol_type = other RNA
ggaggaacttcaaagcaggg

SEQ ID NO: 176 - RNA, 20 nt, synthetic construct
  misc_feature 1..20: note = Description of Artificial Sequence: Synthetic oligonucleotide
  source 1..20: mol_type = other RNA
ttaatcaagtgttaacttat

SEQ ID NO: 177 - RNA, 20 nt, synthetic construct
  misc_feature 1..20: note = Description of Artificial Sequence: Synthetic oligonucleotide
  source 1..20: mol_type = other RNA
gtgcactagtgtgatcttgg

SEQ ID NO: 178 - RNA, 20 nt, synthetic construct
  misc_feature 1..20: note = Description of Artificial Sequence: Synthetic oligonucleotide
  source 1..20: mol_type = other RNA
gtttcaccgtgttagccagg

SEQ ID NO: 179 - RNA, 20 nt, synthetic construct
  misc_feature 1..20: note = Description of Artificial Sequence: Synthetic oligonucleotide
  source 1..20: mol_type = other RNA
tcttgctctttaacccaggc

SEQ ID NO: 180 - RNA, 20 nt, synthetic construct
  misc_feature 1..20: note = Description of Artificial Sequence: Synthetic oligonucleotide
  source 1..20: mol_type = other RNA
gacctcaagcgagttaagag

SEQ ID NO: 181 - RNA, 20 nt, synthetic construct
  misc_feature 1..20: note = Description of Artificial Sequence: Synthetic oligonucleotide
  source 1..20: mol_type = other RNA
gatgtcactggaggattaga

SEQ ID NO: 182 - RNA, 20 nt, synthetic construct
  misc_feature 1..20: note = Description of Artificial Sequence: Synthetic oligonucleotide
  source 1..20: mol_type = other RNA
ggaaccaactgcacttgttg

SEQ ID NO: 183 - RNA, 20 nt, synthetic construct
  misc_feature 1..20: note = Description of Artificial Sequence: Synthetic oligonucleotide
  source 1..20: mol_type = other RNA
gttatcaggtttgtattcag

SEQ ID NO: 184 - RNA, 20 nt, synthetic construct
  misc_feature 1..20: note = Description of Artificial Sequence: Synthetic oligonucleotide
  source 1..20: mol_type = other RNA
tctttcttatacttaccttg

SEQ ID NO: 185 - RNA, 20 nt, synthetic construct
  misc_feature 1..20: note = Description of Artificial Sequence: Synthetic oligonucleotide
  source 1..20: mol_type = other RNA
catatctaagaaatcattgt

SEQ ID NO: 186 - RNA, 20 nt, synthetic construct
  misc_feature 1..20: note = Description of Artificial Sequence: Synthetic oligonucleotide
  source 1..20: mol_type = other RNA
gtttactcctatgttttctt

SEQ ID NO: 187 - RNA, 20 nt, synthetic construct
  misc_feature 1..20: note = Description of Artificial Sequence: Synthetic oligonucleotide
  source 1..20: mol_type = other RNA
ggttattcagttgtcccagc

SEQ ID NO: 188 - RNA, 20 nt, synthetic construct
  misc_feature 1..20: note = Description of Artificial Sequence: Synthetic oligonucleotide
  source 1..20: mol_type = other RNA
tgggtcccttgcatttccgt

SEQ ID NO: 189 - RNA, 15 nt, synthetic construct
  misc_feature 1..15: note = Description of Artificial Sequence: Synthetic oligonucleotide
  source 1..15: mol_type = other RNA
cgtttgaatgagtta

SEQ ID NO: 190 - RNA, 15 nt, synthetic construct
  misc_feature 1..15: note = Description of Artificial Sequence: Synthetic oligonucleotide
  source 1..15: mol_type = other RNA
cagctcactaaaaca

SEQ ID NO: 191 - RNA, 15 nt, synthetic construct
  misc_feature 1..15: note = Description of Artificial Sequence: Synthetic oligonucleotide
  source 1..15: mol_type = other RNA
catttccgtacgaaa

SEQ ID NO: 192 - RNA, 15 nt, synthetic construct
  misc_feature 1..15: note = Description of Artificial Sequence: Synthetic oligonucleotide
  source 1..15: mol_type = other RNA
aatagaattttatta

SEQ ID NO: 193 - RNA, 20 nt, synthetic construct
  misc_feature 1..20: note = Description of Artificial Sequence: Synthetic oligonucleotide
  source 1..20: mol_type = other RNA
ttccctaacttcgcaaactg

SEQ ID NO: 194 - RNA, 20 nt, synthetic construct
  misc_feature 1..20: note = Description of Artificial Sequence: Synthetic oligonucleotide
  source 1..20: mol_type = other RNA
taagttcgttccctaacttc

SEQ ID NO: 195 - RNA, 20 nt, synthetic construct
  misc_feature 1..20: note = Description of Artificial Sequence: Synthetic oligonucleotide
  source 1..20: mol_type = other RNA
tcaagttcgttccctaactt

SEQ ID NO: 196 - RNA, 20 nt, synthetic construct
  misc_feature 1..20: note = Description of Artificial Sequence: Synthetic oligonucleotide
  source 1..20: mol_type = other RNA
ttctccagaagagagaaaca

SEQ ID NO: 197 - RNA, 20 nt, synthetic construct
  misc_feature 1..20: note = Description of Artificial Sequence: Synthetic oligonucleotide
  source 1..20: mol_type = other RNA
tccagtttctccagaagaga

SEQ ID NO: 198 - RNA, 20 nt, synthetic construct
  misc_feature 1..20: note = Description of Artificial Sequence: Synthetic oligonucleotide
  source 1..20: mol_type = other RNA
tccaagttctcttcacaaca

SEQ ID NO: 199 - RNA, 20 nt, synthetic construct
  misc_feature 1..20: note = Description of Artificial Sequence: Synthetic oligonucleotide
  source 1..20: mol_type = other RNA
ttgaggaggtaaccctagag

SEQ ID NO: 200 - RNA, 20 nt, synthetic construct
  misc_feature 1..20: note = Description of Artificial Sequence: Synthetic oligonucleotide
  source 1..20: mol_type = other RNA
ttatgtcatccactacccgc

SEQ ID NO: 201 - RNA, 20 nt, synthetic construct
  misc_feature 1..20: note = Description of Artificial Sequence: Synthetic oligonucleotide
  source 1..20: mol_type = other RNA
tttatgtcatccactacccg

SEQ ID NO: 202 - RNA, 20 nt, synthetic construct
  misc_feature 1..20: note = Description of Artificial Sequence: Synthetic oligonucleotide
  source 1..20: mol_type = other RNA
ttaaaagcattatgtcatcc

SEQ ID NO: 203 - RNA, 20 nt, synthetic construct
  misc_feature 1..20: note = Description of Artificial Sequence: Synthetic oligonucleotide
  source 1..20: mol_type = other RNA
tccattggatgcgttcacac

SEQ ID NO: 204 - RNA, 20 nt, synthetic construct
  misc_feature 1..20: note = Description of Artificial Sequence: Synthetic oligonucleotide
  source 1..20: mol_type = other RNA
ttcacaggctgcttcaagtg

SEQ ID NO: 205 - RNA, 20 nt, synthetic construct
  misc_feature 1..20: note = Description of Artificial Sequence: Synthetic oligonucleotide
  source 1..20: mol_type = other RNA
tctaaatgaaacgccaggag

SEQ ID NO: 206 - RNA, 20 nt, synthetic construct
  misc_feature 1..20: note = Description of Artificial Sequence: Synthetic oligonucleotide
  source 1..20: mol_type = other RNA
tacaaactaaatgaaacgcc

SEQ ID NO: 207 - RNA, 20 nt, synthetic construct
  misc_feature 1..20: note = Description of Artificial Sequence: Synthetic oligonucleotide
  source 1..20: mol_type = other RNA
tctacactacaccacaaact

SEQ ID NO: 208 - RNA, 20 nt, synthetic construct
  misc_feature 1..20: note = Description of Artificial Sequence: Synthetic oligonucleotide
  source 1..20: mol_type = other RNA
ttaactacactacaccacaa

SEQ ID NO: 209 - RNA, 20 nt, synthetic construct
  misc_feature 1..20: note = Description of Artificial Sequence: Synthetic oligonucleotide
  source 1..20: mol_type = other RNA
tttaactacactacaccaca

SEQ ID NO: 210 - RNA, 20 nt, synthetic construct
  misc_feature 1..20: note = Description of Artificial Sequence: Synthetic oligonucleotide
  source 1..20: mol_type = other RNA
ttttaactacactacaccac

SEQ ID NO: 211 - RNA, 20 nt, synthetic construct
  misc_feature 1..20: note = Description of Artificial Sequence: Synthetic oligonucleotide
  source 1..20: mol_type = other RNA
taacctggtttaactacact

SEQ ID NO: 212 - RNA, 20 nt, synthetic construct
  misc_feature 1..20: note = Description of Artificial Sequence: Synthetic oligonucleotide
  source 1..20: mol_type = other RNA
ttaaaacctggtttaactac

SEQ ID NO: 213 - RNA, 20 nt, synthetic construct
  misc_feature 1..20: note = Description of Artificial Sequence: Synthetic oligonucleotide
  source 1..20: mol_type = other RNA
tttaaaacctggtttaacta

SEQ ID NO: 214 - RNA, 20 nt, synthetic construct
  misc_feature 1..20: note = Description of Artificial Sequence: Synthetic oligonucleotide
  source 1..20: mol_type = other RNA
tcacctctctggctatgctt

SEQ ID NO: 215 - RNA, 20 nt, synthetic construct
  misc_feature 1..20: note = Description of Artificial Sequence: Synthetic oligonucleotide
  source 1..20: mol_type = other RNA
tctcatccaactgcctgcag

SEQ ID NO: 216 - RNA, 20 nt, synthetic construct
  misc_feature 1..20: note = Description of Artificial Sequence: Synthetic oligonucleotide
  source 1..20: mol_type = other RNA
tgtacttgacaaatacaact

SEQ ID NO: 217 - RNA, 15 nt, synthetic construct
  misc_feature 1..15: note = Description of Artificial Sequence: Synthetic oligonucleotide
  source 1..15: mol_type = other RNA
tagggaacgaactta

SEQ ID NO: 218 - RNA, 15 nt, synthetic construct
  misc_feature 1..15: note = Description of Artificial Sequence: Synthetic oligonucleotide
  source 1..15: mol_type = other RNA
agggaacgaacttga

SEQ ID NO: 219 - RNA, 15 nt, synthetic construct
  misc_feature 1..15: note = Description of Artificial Sequence: Synthetic oligonucleotide
  source 1..15: mol_type = other RNA
ctctcttctggagaa

SEQ ID NO: 220 - RNA, 15 nt, synthetic construct
  misc_feature 1..15: note = Description of Artificial Sequence: Synthetic oligonucleotide
  source 1..15: mol_type = other RNA
tctggagaaactgga

SEQ ID NO: 221 - RNA, 15 nt, synthetic construct
  misc_feature 1..15: note = Description of Artificial Sequence: Synthetic oligonucleotide
  source 1..15: mol_type = other RNA
tgaagagaacttgga

SEQ ID NO: 222 - RNA, 15 nt, synthetic construct
  misc_feature 1..15: note = Description of Artificial Sequence: Synthetic oligonucleotide
  source 1..15: mol_type = other RNA
gggttacctcctcaa

SEQ ID NO: 223 - RNA, 15 nt, synthetic construct
  misc_feature 1..15: note = Description of Artificial Sequence: Synthetic oligonucleotide
  source 1..15: mol_type = other RNA
tagtggatgacataa

SEQ ID NO: 224 - RNA, 15 nt, synthetic construct
  misc_feature 1..15: note = Description of Artificial Sequence: Synthetic oligonucleotide
  source 1..15: mol_type = other RNA
agtggatgacataaa

SEQ ID NO: 225 - RNA, 15 nt, synthetic construct
  misc_feature 1..15: note = Description of Artificial Sequence: Synthetic oligonucleotide
  source 1..15: mol_type = other RNA
acataatgcttttaa

SEQ ID NO: 226 - RNA, 15 nt, synthetic construct
  misc_feature 1..15: note = Description of Artificial Sequence: Synthetic oligonucleotide
  source 1..15: mol_type = other RNA
aacgcatccaatgga

SEQ ID NO: 227 - RNA, 15 nt, synthetic construct
  misc_feature 1..15: note = Description of Artificial Sequence: Synthetic oligonucleotide
  source 1..15: mol_type = other RNA
gaagcagcctgtgaa

SEQ ID NO: 228 - RNA, 15 nt, synthetic construct
  misc_feature 1..15: note = Description of Artificial Sequence: Synthetic oligonucleotide
  source 1..15: mol_type = other RNA
ttcatttagtttgta

SEQ ID NO: 229 - RNA, 15 nt, synthetic construct
  misc_feature 1..15: note = Description of Artificial Sequence: Synthetic oligonucleotide
  source 1..15: mol_type = other RNA
gtgtagtgtagttaa

SEQ ID NO: 230 - RNA, 15 nt, synthetic construct
  misc_feature 1..15: note = Description of Artificial Sequence: Synthetic oligonucleotide
  source 1..15: mol_type = other RNA
tgtagtgtagttaaa

SEQ ID NO: 231 - RNA, 15 nt, synthetic construct
  misc_feature 1..15: note = Description of Artificial Sequence: Synthetic oligonucleotide
  source 1..15: mol_type = other RNA
gtagtgtagttaaaa

SEQ ID NO: 232 - RNA, 15 nt, synthetic construct
  misc_feature 1..15: note = Description of Artificial Sequence: Synthetic oligonucleotide
  source 1..15: mol_type = other RNA
agttaaaccaggtta

SEQ ID NO: 233 - RNA, 15 nt, synthetic construct
  misc_feature 1..15: note = Description of Artificial Sequence: Synthetic oligonucleotide
  source 1..15: mol_type = other RNA
taaaccaggttttaa

SEQ ID NO: 234 - RNA, 15 nt, synthetic construct
  misc_feature 1..15: note = Description of Artificial Sequence: Synthetic oligonucleotide
  source 1..15: mol_type = other RNA
aaaccaggttttaaa

SEQ ID NO: 235 - RNA, 15 nt, synthetic construct
  misc_feature 1..15: note = Description of Artificial Sequence: Synthetic oligonucleotide
  source 1..15: mol_type = other RNA
tagccagagaggtga

SEQ ID NO: 236 - RNA, 15 nt, synthetic construct
  misc_feature 1..15: note = Description of Artificial Sequence: Synthetic oligonucleotide
  source 1..15: mol_type = other RNA
ggcagttggatgaga

SEQ ID NO: 237 - RNA, 20 nt, synthetic construct
  misc_feature 1..20: note = Description of Artificial Sequence: Synthetic oligonucleotide
  modified_base 1..3: mod_base = OTHER; note = Phosphorothioate internucleotide linkage
  modified_base 1: mod_base = um
  modified_base 2: mod_base = OTHER; note = 2-prime-fluorouridine
  modified_base 3: mod_base = cm
  modified_base 4: mod_base = OTHER; note = 2-prime-fluoroadenosine
  modified_base 5: mod_base = um
  modified_base 6: mod_base = OTHER; note = 2-prime-fluorocytidine
  modified_base 7: mod_base = OTHER; note = 2-prime-O-methyladenosine
  modified_base 8: mod_base = OTHER; note = 2-prime-fluoroguanosine
  modified_base 9: mod_base = cm
  modified_base 10: mod_base = OTHER; note = 2-prime-fluorouridine
  modified_base 11: mod_base = um
  modified_base 12: mod_base = OTHER; note = 2-prime-fluorouridine
  modified_base 13..20: mod_base = OTHER; note = Phosphorothioate internucleotide linkage
  modified_base 13: mod_base = um
  modified_base 14: mod_base = OTHER; note = 2-prime-fluorocytidine
  modified_base 15: mod_base = cm
  modified_base 16: mod_base = OTHER; note = 2-prime-fluoroadenosine
  modified_base 17: mod_base = gm
  modified_base 18: mod_base = OTHER; note = 2-prime-fluoroguanosine
  modified_base 19: mod_base = gm
  modified_base 20: mod_base = OTHER; note = 2-prime-fluorouridine
  modified_base 20: mod_base = OTHER; note = 2-prime-fluorouridine
  source 1..20: mol_type = other RNA
ttcatcagcttttccagggt

SEQ ID NO: 238 - RNA, 20 nt, synthetic construct
  misc_feature 1..20: note = Description of Artificial Sequence: Synthetic oligonucleotide
  modified_base 1..3: mod_base = OTHER; note = Phosphorothioate internucleotide linkage
  modified_base 1: mod_base = um
  modified_base 2: mod_base = OTHER; note = 2-prime-fluorouridine
  modified_base 3: mod_base = gm
  modified_base 4: mod_base = OTHER; note = 2-prime-fluoroadenosine
  modified_base 5: mod_base = gm
  modified_base 6: mod_base = OTHER; note = 2-prime-fluoroguanosine
  modified_base 7: mod_base = gm
  modified_base 8: mod_base = OTHER; note = 2-prime-fluoroadenosine
  modified_base 9: mod_base = cm
  modified_base 10: mod_base = OTHER; note = 2-prime-fluorouridine
  modified_base 11: mod_base = cm
  modified_base 12: mod_base = OTHER; note = 2-prime-fluoroguanosine
  modified_base 13..20: mod_base = OTHER; note = Phosphorothioate internucleotide linkage
  modified_base 13: mod_base = OTHER; note = 2-prime-O-methyladenosine
  modified_base 14: mod_base = OTHER; note = 2-prime-fluoroadenosine
  modified_base 15: mod_base = gm
  modified_base 16: mod_base = OTHER; note = 2-prime-fluoroguanosine
  modified_base 17: mod_base = cm
  modified_base 18: mod_base = OTHER; note = 2-prime-fluorocytidine
  modified_base 19: mod_base = um
  modified_base 20: mod_base = OTHER; note = 2-prime-fluorouridine
  source 1..20: mol_type = other RNA
ttgagggactcgaaggcctt

SEQ ID NO: 239 - RNA, 20 nt, synthetic construct
  misc_feature 1..20: note = Description of Artificial Sequence: Synthetic oligonucleotide
  modified_base 1..3: mod_base = OTHER; note = Phosphorothioate internucleotide linkage
  modified_base 1: mod_base = um
  modified_base 2: mod_base = OTHER; note = 2-prime-fluorocytidine
  modified_base 3: mod_base = um
  modified_base 4: mod_base = OTHER; note = 2-prime-fluoroguanosine
  modified_base 5: mod_base = cm
  modified_base 6: mod_base = OTHER; note = 2-prime-fluorouridine
  modified_base 7: mod_base = gm
  modified_base 8: mod_base = OTHER; note = 2-prime-fluorocytidine
  modified_base 9: mod_base = um
  modified_base 10: mod_base = OTHER; note = 2-prime-fluoroguanosine
  modified_base 11: mod_base = cm
  modified_base 12: mod_base = OTHER; note = 2-prime-fluorouridine
  modified_base 13..20: mod_base = OTHER; note = Phosphorothioate internucleotide linkage
  modified_base 13: mod_base = gm
  modified_base 14: mod_base = OTHER; note = 2-prime-fluorocytidine
  modified_base 15: mod_base = um
  modified_base 16: mod_base = OTHER; note = 2-prime-fluoroguanosine
  modified_base 17: mod_base = cm
  modified_base 18: mod_base = OTHER; note = 2-prime-fluorouridine
  modified_base 19: mod_base = gm
  modified_base 20: mod_base = OTHER; note = 2-prime-fluorocytidine
  source 1..20: mol_type = other RNA
tctgctgctgctgctgctgc

SEQ ID NO: 240 - RNA, 20 nt, synthetic construct
  misc_feature 1..20: note = Description of Artificial Sequence: Synthetic oligonucleotide
  modified_base 1..3: mod_base = OTHER; note = Phosphorothioate internucleotide linkage
  modified_base 1: mod_base = um
  modified_base 2: mod_base = OTHER; note = 2-prime-fluorouridine
  modified_base 3: mod_base = um
  modified_base 4: mod_base = OTHER; note = 2-prime-fluorocytidine
  modified_base 5: mod_base = um
  modified_base 6: mod_base = OTHER; note = 2-prime-fluorouridine
  modified_base 7: mod_base = um
  modified_base 8: mod_base = OTHER; note = 2-prime-fluoroguanosine
  modified_base 9: mod_base = gm
  modified_base 10: mod_base = OTHER; note = 2-prime-fluorouridine
  modified_base 11: mod_base = cm
  modified_base 12: mod_base = OTHER; note = 2-prime-fluoroguanosine
  modified_base 13..20: mod_base = OTHER; note = Phosphorothioate internucleotide linkage
  modified_base 13: mod_base = gm
  modified_base 14: mod_base = OTHER; note = 2-prime-fluorouridine
  modified_base 15: mod_base = gm
  modified_base 16: mod_base = OTHER; note = 2-prime-fluorocytidine
  modified_base 17: mod_base = OTHER; note = 2-prime-O-methyladenosine
  modified_base 18: mod_base = OTHER; note = 2-prime-fluoroguanosine
  modified_base 19: mod_base = cm
  modified_base 20: mod_base = OTHER; note = 2-prime-fluoroguanosine
  source 1..20: mol_type = other RNA
tttctttggtcggtgcagcg

SEQ ID NO: 241 - RNA, 20 nt, synthetic construct
  misc_feature 1..20: note = Description of Artificial Sequence: Synthetic oligonucleotide
  modified_base 1: mod_base = um
  modified_base 1..3: mod_base = OTHER; note = Phosphorothioate internucleotide linkage
  modified_base 2: mod_base = OTHER; note = 2-prime-fluorouridine
  modified_base 3: mod_base = um
  modified_base 4: mod_base = OTHER; note = 2-prime-fluoroguanosine
  modified_base 5: mod_base = gm
  modified_base 6: mod_base = OTHER; note = 2-prime-fluorouridine
  modified_base 7: mod_base = OTHER; note = 2-prime-O-methyladenosine
  modified_base 8: mod_base = OTHER; note = 2-prime-fluoroguanosine
  modified_base 9: mod_base = cm
  modified_base 10: mod_base = OTHER; note = 2-prime-fluorouridine
  modified_base 11: mod_base = gm
  modified_base 12: mod_base = OTHER; note = 2-prime-fluoroadenosine
  modified_base 13..20: mod_base = OTHER; note = Phosphorothioate internucleotide linkage
  modified_base 13: mod_base = OTHER; note = 2-prime-O-methyladenosine
  modified_base 14: mod_base = OTHER; note = 2-prime-fluoroadenosine
  modified_base 15: mod_base = gm
  modified_base 16: mod_base = OTHER; note = 2-prime-fluorouridine
  modified_base 17: mod_base = um
  modified_base 18: mod_base = OTHER; note = 2-prime-fluorocytidine
  modified_base 19: mod_base = um
  modified_base 20: mod_base = OTHER; note = 2-prime-fluorouridine
  source 1..20: mol_type = other RNA
tttggtagctgaaagttctt

SEQ ID NO: 242 - RNA, 20 nt, synthetic construct
  misc_feature 1..20: note = Description of Artificial Sequence: Synthetic oligonucleotide
  modified_base 1: mod_base = um
  modified_base 1..3: mod_base = OTHER; note = Phosphorothioate internucleotide linkage
  modified_base 2: mod_base = OTHER; note = 2-prime-fluorouridine
  modified_base 3: mod_base = cm
  modified_base 4: mod_base = OTHER; note = 2-prime-fluoroguanosine
  modified_base 5: mod_base = gm
  modified_base 6: mod_base = OTHER; note = 2-prime-fluorouridine
  modified_base 7: mod_base = cm
  modified_base 8: mod_base = OTHER; note = 2-prime-fluorouridine
  modified_base 9: mod_base = um
  modified_base 10: mod_base = OTHER; note = 2-prime-fluorouridine
  modified_base 11: mod_base = cm
  modified_base 12: mod_base = OTHER; note = 2-prime-fluorouridine
  modified_base 13: mod_base = um
  misc_feature 13..20
  modified_base 14: mod_base = OTHER; note = 2-prime-fluoroguanosine
  modified_base 15: mod_base = gm
  modified_base 16: mod_base = OTHER; note = 2-prime-fluorouridine
  modified_base 17: mod_base = OTHER; note = 2-prime-O-methyladenosine
  modified_base 18: mod_base = OTHER; note = 2-prime-fluoroguanosine
  modified_base 19: mod_base = cm
  modified_base 20: mod_base = OTHER; note = 2-prime-fluorouridine
  source 1..20: mol_type = other RNA
tacggtctttcttggtagct

SEQ ID NO: 243 - RNA, 20 nt, synthetic construct
  misc_feature 1..20: note = Description of Artificial Sequence: Synthetic oligonucleotide
  modified_base 1..3: mod_base = OTHER; note = Phosphorothioate internucleotide linkage
  modified_base 1: mod_base = um
  modified_base 2: mod_base = OTHER; note = 2-prime-fluorouridine
  modified_base 3: mod_base = cm
  modified_base 4: mod_base = OTHER; note = 2-prime-fluoroadenosine
  modified_base 5: mod_base = gm
  modified_base 6: mod_base = OTHER; note = 2-prime-fluoroadenosine
  modified_base 7: mod_base = cm
  modified_base 8: mod_base = OTHER; note = 2-prime-fluoroadenosine
  modified_base 9: mod_base = OTHER; note = 2-prime-O-methyladenosine
  modified_base 10: mod_base = OTHER; note = 2-prime-fluorouridine
  modified_base 11: mod_base = gm
  modified_base 12: mod_base = OTHER; note = 2-prime-fluoroadenosine
  modified_base 13..20: mod_base = OTHER; note = Phosphorothioate internucleotide linkage
  modified_base 13: mod_base = um
  modified_base 14: mod_base = OTHER; note = 2-prime-fluorouridine
  modified_base 15: mod_base = cm
  modified_base 16: mod_base = OTHER; note = 2-prime-fluoroadenosine
  modified_base 17: mod_base = cm
  modified_base 18: mod_base = OTHER; note = 2-prime-fluoroadenosine
  modified_base 19: mod_base = cm
  modified_base 20: mod_base = OTHER; note = 2-prime-fluoroguanosine
  source 1..20: mol_type = other RNA
ttcagacaatgattcacacg

SEQ ID NO: 244 - RNA, 20 nt, synthetic construct
  misc_feature 1..20: note = Description of Artificial Sequence: Synthetic oligonucleotide
  modified_base 1..3: mod_base = OTHER; note = Phosphorothioate internucleotide linkage
  modified_base 1: mod_base = um
  modified_base 2: mod_base = OTHER; note = 2-prime-fluoroadenosine
  modified_base 3: mod_base = cm
  modified_base 4: mod_base = OTHER; note = 2-prime-fluoroadenosine
  modified_base 5: mod_base = um
  modified_base 6: mod_base = OTHER; note = 2-prime-fluoroadenosine
  modified_base 7: mod_base = um
  modified_base 8: mod_base = OTHER; note = 2-prime-fluorouridine
  modified_base 9: mod_base = gm
  modified_base 10: mod_base = OTHER; note = 2-prime-fluorouridine
  modified_base 11: mod_base = cm
  modified_base 12: mod_base = OTHER; note = 2-prime-fluoroadenosine
  modified_base 13..20: mod_base = OTHER; note = Phosphorothioate internucleotide linkage
  modified_base 13: mod_base = gm
  modified_base 14: mod_base = OTHER; note = 2-prime-fluoroadenosine
  modified_base 15: mod_base = cm
  modified_base 16: mod_base = OTHER; note = 2-prime-fluoroadenosine
  modified_base 17: mod_base = OTHER; note = 2-prime-O-methyladenosine
  modified_base 18: mod_base = OTHER; note = 2-prime-fluorouridine
  modified_base 19: mod_base = gm
  modified_base 20: mod_base = OTHER; note = 2-prime-fluoroadenosine
  source 1..20: mol_type = other RNA
tacatattgtcagacaatga

SEQ ID NO: 245 - RNA, 20 nt, synthetic construct
  misc_feature 1..20: note = Description of Artificial Sequence: Synthetic oligonucleotide
  modified_base 1..3: mod_base = OTHER; note = Phosphorothioate internucleotide linkage
  modified_base 1: mod_base = um
  modified_base 2: mod_base = OTHER; note = 2-prime-fluoroadenosine
  modified_base 3: mod_base = um
  modified_base 4: mod_base = OTHER; note = 2-prime-fluoroguanosine
  modified_base 5: mod_base = um
  modified_base 6: mod_base = OTHER; note = 2-prime-fluorouridine
  modified_base 7: mod_base = um
  modified_base 8: mod_base = OTHER; note = 2-prime-fluorouridine
  modified_base 9: mod_base = cm
  modified_base 10: mod_base = OTHER; note = 2-prime-fluoroadenosine
  modified_base 11: mod_base = cm
  modified_base 12: mod_base = OTHER; note = 2-prime-fluoroadenosine
  modified_base 13..20: mod_base = OTHER; note = Phosphorothioate internucleotide linkage
  modified_base 13: mod_base = um
  modified_base 14: mod_base = OTHER; note = 2-prime-fluoroadenosine
  modified_base 15: mod_base = um
  modified_base 16: mod_base = OTHER; note = 2-prime-fluorouridine
  modified_base 17: mod_base = gm
  modified_base 18: mod_base = OTHER; note = 2-prime-fluorouridine
  modified_base 19: mod_base = cm
  modified_base 20: mod_base = OTHER; note = 2-prime-fluoroadenosine
  source 1..20: mol_type = other RNA
tatgttttcacatattgtca

SEQ ID NO: 246 - RNA, 20 nt, synthetic construct
  misc_feature 1..20: note = Description of Artificial Sequence: Synthetic oligonucleotide
  modified_base 1..3: mod_base = OTHER; note = Phosphorothioate internucleotide linkage
  modified_base 1: mod_base = um
  modified_base 2: mod_base = OTHER; note = 2-prime-fluoroadenosine
  modified_base 3: mod_base = cm
  modified_base 4: mod_base = OTHER; note = 2-prime-fluoroadenosine
  modified_base 5: mod_base = cm
  modified_base 6: mod_base = OTHER; note = 2-prime-fluorouridine
  modified_base 7: mod_base = OTHER; note = 2-prime-O-methyladenosine
  modified_base 8: mod_base = OTHER; note = 2-prime-fluorouridine
  modified_base 9: mod_base = gm
  modified_base 10: mod_base = OTHER; note = 2-prime-fluorouridine
  modified_base 11: mod_base = um
  modified_base 12: mod_base = OTHER; note = 2-prime-fluorouridine
  modified_base 13..20: mod_base = OTHER; note = Phosphorothioate internucleotide linkage
  modified_base 13: mod_base = um
  modified_base 14: mod_base = OTHER; note = 2-prime-fluoroadenosine
  modified_base 15: mod_base = OTHER; note = 2-prime-O-methyladenosine
  modified_base 16: mod_base = OTHER; note = 2-prime-fluoroadenosine
  modified_base 17: mod_base = OTHER; note = 2-prime-O-methyladenosine
  modified_base 18: mod_base = OTHER; note = 2-prime-fluorouridine
  modified_base 19: mod_base = OTHER; note = 2-prime-O-methyladenosine
  modified_base 20: mod_base = OTHER; note = 2-prime-fluorouridine
  source 1..20: mol_type = other RNA
tccactatgttttcacatat

SEQ ID NO: 247 - RNA, 15 nt, synthetic construct
  misc_feature 1..15: note = Description of Artificial Sequence: Synthetic oligonucleotide
  modified_base 1..3: mod_base = OTHER; note = Phosphorothioate internucleotide linkage
  modified_base 1: mod_base = OTHER; note = 2-prime-fluoroguanosine
  modified_base 2: mod_base = gm
  modified_base 3: mod_base = OTHER; note = 2-prime-fluoroadenosine
  modified_base 4: mod_base = OTHER; note = 2-prime-O-methyladenosine
  modified_base 5: mod_base = OTHER; note = 2-prime-fluoroadenosine
  modified_base 6: mod_base = OTHER; note = 2-prime-O-methyladenosine
  modified_base 7: mod_base = OTHER; note = 2-prime-fluoroguanosine
  modified_base 8: mod_base = cm
  modified_base 9: mod_base = OTHER; note = 2-prime-fluorouridine
  modified_base 10: mod_base = gm
  modified_base 11: mod_base = OTHER; note = 2-prime-fluoroadenosine
  modified_base 12: mod_base = um
  modified_base 13..15: mod_base = OTHER; note = Phosphorothioate internucleotide linkage
  modified_base 13: mod_base = OTHER; note = 2-prime-fluoroguanosine
  modified_base 14: mod_base = OTHER; note = 2-prime-O-methyladenosine
  modified_base 15: mod_base = OTHER; note = 2-prime-fluoroadenosine
  source 1..15: mol_type = other RNA
ggaaaagctgatgaa

SEQ ID NO: 248 - RNA, 15 nt, synthetic construct
  misc_feature 1..15: note = Description of Artificial Sequence: Synthetic oligonucleotide
  modified_base 1..3: mod_base = OTHER; note = Phosphorothioate internucleotide linkage
  modified_base 1: mod_base = OTHER; note = 2-prime-fluorocytidine
  modified_base 2: mod_base = um
  modified_base 3: mod_base = OTHER; note = 2-prime-fluorouridine
  modified_base 4: mod_base = cm
  modified_base 5: mod_base = OTHER; note = 2-prime-fluoroguanosine
  modified_base 6: mod_base = OTHER; note = 2-prime-O-methyladenosine
  modified_base 7: mod_base = OTHER; note = 2-prime-fluoroguanosine
  modified_base 8: mod_base = um
  modified_base 9: mod_base = OTHER; note = 2-prime-fluorocytidine
  modified_base 10: mod_base = cm
  modified_base 11: mod_base = OTHER; note = 2-prime-fluorocytidine
  modified_base 12: mod_base = um
  modified_base 13: mod_base = OTHER; note = 2-prime-fluorocytidine
  modified_base 13..15: mod_base = OTHER; note = Phosphorothioate internucleotide linkage
  modified_base 14: mod_base = OTHER; note = 2-prime-O-methyladenosine
  modified_base 15: mod_base = OTHER; note = 2-prime-fluoroadenosine
  source 1..15: mol_type = other RNA
cttcgagtccctcaa

SEQ ID NO: 249 - RNA, 15 nt, synthetic construct
  misc_feature 1..15: note = Description of Artificial Sequence: Synthetic oligonucleotide
  modified_base 1..3: mod_base = OTHER; note = Phosphorothioate internucleotide linkage
  modified_base 1: mod_base = OTHER; note = 2-prime-fluoroadenosine
  modified_base 2: mod_base = gm
  modified_base 3: mod_base = OTHER; note = 2-prime-fluorocytidine
  modified_base 4: mod_base = OTHER; note = 2-prime-O-methyladenosine
  modified_base 5: mod_base = OTHER; note = 2-prime-fluoroguanosine
  modified_base 6: mod_base = cm
  modified_base 7: mod_base = OTHER; note = 2-prime-fluoroadenosine
  modified_base 8: mod_base = gm
  modified_base 9: mod_base = OTHER; note = 2-prime-fluorocytidine
  modified_base 10: mod_base = OTHER; note = 2-prime-O-methyladenosine
  modified_base 11: mod_base = OTHER; note = 2-prime-fluoroguanosine
  modified_base 12: mod_base = cm
  modified_base 13..15: mod_base = OTHER; note = Phosphorothioate internucleotide linkage
  modified_base 13: mod_base = OTHER; note = 2-prime-fluoroadenosine
  modified_base 14: mod_base = gm
  modified_base 15: mod_base = OTHER; note = 2-prime-fluoroadenosine
  source 1..15: mol_type = other RNA
agcagcagcagcaga

SEQ ID NO: 250 - RNA, 15 nt, synthetic construct
  misc_feature 1..15: note = Description of Artificial Sequence: Synthetic oligonucleotide
  modified_base 1..3: mod_base = OTHER; note = Phosphorothioate internucleotide linkage
  modified_base 1: mod_base = OTHER; note = 2-prime-fluorocytidine
  modified_base 2: mod_base = OTHER; note = 2-prime-O-methyladenosine
  modified_base 3: mod_base = OTHER; note = 2-prime-fluorocytidine
  modified_base 4: mod_base = cm
  modified_base 5: mod_base = OTHER; note = 2-prime-fluoroguanosine
  modified_base 6: mod_base = OTHER; note = 2-prime-O-methyladenosine
  modified_base 7: mod_base = OTHER; note = 2-prime-fluorocytidine
  modified_base 8: mod_base = cm
  modified_base 9: mod_base = OTHER; note = 2-prime-fluoroadenosine
  modified_base 10: mod_base = OTHER; note = 2-prime-O-methyladenosine
  modified_base 11: mod_base = OTHER; note = 2-prime-fluoroadenosine
  modified_base 12: mod_base = gm
  modified_base 13..15: mod_base = OTHER; note = Phosphorothioate internucleotide linkage
  modified_base 13: mod_base = OTHER; note = 2-prime-fluoroadenosine
  modified_base 14: mod_base = OTHER; note = 2-prime-O-methyladenosine
  modified_base 15: mod_base = OTHER; note = 2-prime-fluoroadenosine
  source 1..15: mol_type = other RNA
caccgaccaaagaaa

SEQ ID NO: 251 - RNA, 15 nt, synthetic construct
  misc_feature 1..15: note = Description of Artificial Sequence: Synthetic oligonucleotide
  modified_base 1..3: mod_base = OTHER; note = Phosphorothioate internucleotide linkage
  modified_base 1: mod_base = OTHER; note = 2-prime-fluorocytidine
  modified_base 2: mod_base = um
  modified_base 3: mod_base = OTHER; note = 2-prime-fluorouridine
  modified_base 4: mod_base = um
  modified_base 5: mod_base = OTHER; note = 2-prime-fluorocytidine
  modified_base 6: mod_base = OTHER; note = 2-prime-O-methyladenosine
  modified_base 7: mod_base = OTHER; note = 2-prime-fluoroguanosine
  modified_base 8: mod_base = cm
  modified_base 9: mod_base = OTHER; note = 2-prime-fluorouridine
  modified_base 10: mod_base = OTHER; note = 2-prime-O-methyladenosine
  modified_base 11: mod_base = OTHER; note = 2-prime-fluorocytidine
  modified_base 12: mod_base = cm
  modified_base 13..15: mod_base = OTHER; note = Phosphorothioate internucleotide linkage
  modified_base 13: mod_base = OTHER; note = 2-prime-fluoroadenosine
  modified_base 14: mod_base = OTHER; note = 2-prime-O-methyladenosine
  modified_base 15: mod_base = OTHER; note = 2-prime-fluoroadenosine
  source 1..15: mol_type = other RNA
ctttcagctaccaaa

SEQ ID NO: 252 - RNA, 15 nt, synthetic construct
  misc_feature 1..15: note = Description of Artificial Sequence: Synthetic oligonucleotide
  modified_base 1..3: mod_base = OTHER; note = Phosphorothioate internucleotide linkage
  modified_base 1: mod_base = OTHER; note = 2-prime-fluorocytidine
  modified_base 2: mod_base = cm
  modified_base 3: mod_base = OTHER; note = 2-prime-fluoroadenosine
  modified_base 4: mod_base = OTHER; note = 2-prime-O-methyladenosine
  modified_base 5: mod_base = OTHER; note = 2-prime-fluoroguanosine
  modified_base 6: mod_base = OTHER; note = 2-prime-O-methyladenosine
  modified_base 7: mod_base = OTHER; note = 2-prime-fluoroadenosine
  modified_base 8: mod_base = OTHER; note = 2-prime-O-methyladenosine
  modified_base 9: mod_base = OTHER; note = 2-prime-fluoroguanosine
  modified_base 10: mod_base = OTHER; note = 2-prime-O-methyladenosine
  modified_base 11: mod_base = OTHER; note = 2-prime-fluorocytidine
  modified_base 12: mod_base = cm
  modified_base 13..15: mod_base = OTHER; note = Phosphorothioate internucleotide linkage
  modified_base 13: mod_base = OTHER; note = 2-prime-fluoroguanosine
  modified_base 14: mod_base = um
  modified_base 15: mod_base = OTHER; note = 2-prime-fluoroadenosine
  source 1..15: mol_type = other RNA
ccaagaaagaccgta

SEQ ID NO: 253 - RNA, 15 nt, synthetic construct
  misc_feature 1..15: note = Description of Artificial Sequence: Synthetic oligonucleotide
  modified_base 1..3: mod_base = OTHER; note = Phosphorothioate internucleotide linkage
  modified_base 1: mod_base = OTHER; note = 2-prime-fluoroguanosine
  modified_base 2: mod_base = OTHER; note = 2-prime-O-methyladenosine
  modified_base 3: mod_base = OTHER; note = 2-prime-fluoroadenosine
  modified_base 4: mod_base = um
  modified_base 5: mod_base = OTHER; note = 2-prime-fluorocytidine
  modified_base 6: mod_base = OTHER; note = 2-prime-O-methyladenosine
  modified_base 7: mod_base = OTHER; note = 2-prime-fluorouridine
  modified_base 8: mod_base = um
  modified_base 9: mod_base = OTHER; note = 2-prime-fluoroguanosine
  modified_base 10: mod_base = um
  modified_base 11: mod_base = OTHER; note = 2-prime-fluorocytidine
  modified_base 12: mod_base = um
  modified_base 13..15: mod_base = OTHER; note = Phosphorothioate internucleotide linkage
  modified_base 13: mod_base = OTHER; note = 2-prime-fluoroguanosine
  modified_base 14: mod_base = OTHER; note = 2-prime-O-methyladenosine
  modified_base 15: mod_base = OTHER; note = 2-prime-fluoroadenosine
  source 1..15: mol_type = other RNA
gaatcattgtctgaa

SEQ ID NO: 254 - RNA, 15 nt, synthetic construct
  misc_feature 1..15: note = Description of Artificial Sequence: Synthetic oligonucleotide
  modified_base 1..3: mod_base = OTHER; note = Phosphorothioate internucleotide linkage
  modified_base 1: mod_base = OTHER; note = 2-prime-fluoroguanosine
  modified_base 2: mod_base = um
  modified_base 3: mod_base = OTHER; note = 2-prime-fluorocytidine
  modified_base 4: mod_base = um
  modified_base 5: mod_base = OTHER; note = 2-prime-fluoroguanosine
  modified_base 6: mod_base = OTHER; note = 2-prime-O-methyladenosine
  modified_base 7: mod_base = OTHER; note = 2-prime-fluorocytidine
  modified_base 8: mod_base = OTHER; note = 2-prime-O-methyladenosine
  modified_base 9: mod_base = OTHER; note = 2-prime-fluoroadenosine
  modified_base 10: mod_base = um
  modified_base 11: mod_base = OTHER; note = 2-prime-fluoroadenosine
  modified_base 12: mod_base = um
  modified_base 13..15: mod_base = OTHER; note = Phosphorothioate internucleotide linkage
  modified_base 13: mod_base = OTHER; note = 2-prime-fluoroguanosine
  modified_base 14: mod_base = um
  modified_base 15: mod_base = OTHER; note = 2-prime-fluoroadenosine
  source 1..15: mol_type = other RNA
gtctgacaatatgta

SEQ ID NO: 255 - RNA, 15 nt, synthetic construct
  misc_feature 1..15: note = Description of Artificial Sequence: Synthetic oligonucleotide
  modified_base 1..3: mod_base = OTHER; note = Phosphorothioate internucleotide linkage
  modified_base 1: mod_base = OTHER; note = 2-prime-fluoroadenosine
  modified_base 2: mod_base = um
  modified_base 3: mod_base = OTHER; note = 2-prime-fluoroadenosine
  modified_base 4: mod_base = um
  modified_base 5: mod_base = OTHER; note = 2-prime-fluoroguanosine
  modified_base 6: mod_base = um
  modified_base 7: mod_base = OTHER; note = 2-prime-fluoroguanosine
  modified_base 8: mod_base = OTHER; note = 2-prime-O-methyladenosine
  modified_base 9: mod_base = OTHER; note = 2-prime-fluoroadenosine
  modified_base 10: mod_base = OTHER; note = 2-prime-O-methyladenosine
  modified_base 11: mod_base = OTHER; note = 2-prime-fluoroadenosine
  modified_base 12: mod_base = cm
  modified_base 13..15: mod_base = OTHER; note = Phosphorothioate internucleotide linkage
  modified_base 13: mod_base = OTHER; note = 2-prime-fluoroadenosine
  modified_base 14: mod_base = um
  modified_base 15: mod_base = OTHER; note = 2-prime-fluoroadenosine
  source 1..15: mol_type = other RNA
atatgtgaaaacata

SEQ ID NO: 256 - RNA, 15 nt, synthetic construct
  misc_feature 1..15: note = Description of Artificial Sequence: Synthetic oligonucleotide
  modified_base 1..3: mod_base = OTHER; note = Phosphorothioate internucleotide linkage
  modified_base 1: mod_base = OTHER; note = 2-prime-fluorouridine
  modified_base 2: mod_base = gm
  modified_base 3: mod_base = OTHER; note = 2-prime-fluoroadenosine
  modified_base 4: mod_base = OTHER; note = 2-prime-O-methyladenosine
  modified_base 5: mod_base = OTHER; note = 2-prime-fluoroadenosine
  modified_base 6: mod_base = OTHER; note = 2-prime-O-methyladenosine
  modified_base 7: mod_base = OTHER; note = 2-prime-fluorocytidine
  modified_base 8: mod_base = OTHER; note = 2-prime-O-methyladenosine
  modified_base 9: mod_base = OTHER; note = 2-prime-fluorouridine
  modified_base 10: mod_base = OTHER; note = 2-prime-O-methyladenosine
  modified_base 11: mod_base = OTHER; note = 2-prime-fluoroguanosine
  modified_base 12: mod_base = um
  modified_base 13..15: mod_base = OTHER; note = Phosphorothioate internucleotide linkage
  modified_base 13: mod_base = OTHER; note = 2-prime-fluoroguanosine
  modified_base 14: mod_base = gm
  modified_base 15: mod_base = OTHER; note = 2-prime-fluoroadenosine
  source 1..15: mol_type = other RNA
tgaaaacatagtgga

SEQ ID NO: 257 - RNA, 20 nt, synthetic construct
  misc_feature 1..20: note = Description of Artificial Sequence: Synthetic oligonucleotide
  modified_base 1..3: mod_base = OTHER; note = Phosphorothioate internucleotide linkage
  modified_base 1: mod_base = um
  modified_base 2: mod_base = OTHER; note = 2-prime-fluoroadenosine
  modified_base 3: mod_base = OTHER; note = 2-prime-O-methyladenosine
  modified_base 4: mod_base = OTHER; note = 2-prime-fluoroguanosine
  modified_base 5: mod_base = um
  modified_base 6: mod_base = OTHER; note = 2-prime-fluorouridine
  modified_base 7: mod_base = cm
  modified_base 8: mod_base = OTHER; note = 2-prime-fluoroguanosine
  modified_base 9: mod_base = um
  modified_base 10: mod_base = OTHER; note = 2-prime-fluorouridine
  modified_base 11: mod_base = cm
  modified_base 12: mod_base = OTHER; note = 2-prime-fluorocytidine
  modified_base 13..20: mod_base = OTHER; note = Phosphorothioate internucleotide linkage
  modified_base 13: mod_base = cm
  modified_base 14: mod_base = OTHER; note = 2-prime-fluorouridine
  modified_base 15: mod_base = OTHER; note = 2-prime-O-methyladenosine
  modified_base 16: mod_base = OTHER; note = 2-prime-fluoroadenosine
  modified_base 17: mod_base = cm
  modified_base 18: mod_base = OTHER; note = 2-prime-fluorouridine
  modified_base 19: mod_base = um
  modified_base 20: mod_base = OTHER; note = 2-prime-fluorocytidine
  source 1..20: mol_type = other RNA
taagttcgttccctaacttc

SEQ ID NO: 258 - RNA, 20 nt, synthetic construct
  misc_feature 1..20: note = Description of Artificial Sequence: Synthetic oligonucleotide
  modified_base 1..3: mod_base = OTHER; note = Phosphorothioate internucleotide linkage
  modified_base 1: mod_base = um
  modified_base 2: mod_base = OTHER; note = 2-prime-fluorocytidine
  modified_base 3: mod_base = OTHER; note = 2-prime-O-methyladenosine
  modified_base 4: mod_base = OTHER; note = 2-prime-fluoroadenosine
  modified_base 5: mod_base = gm
  modified_base 6: mod_base = OTHER; note = 2-prime-fluorouridine
  modified_base 7: mod_base = um
  modified_base 8: mod_base = OTHER; note = 2-prime-fluorocytidine
  modified_base 9: mod_base = gm
  modified_base 10: mod_base = OTHER; note = 2-prime-fluorouridine
  modified_base 11: mod_base = um
  modified_base 12: mod_base = OTHER; note = 2-prime-fluorocytidine
  modified_base 13..20: mod_base = OTHER; note = Phosphorothioate internucleotide linkage
  modified_base 13: mod_base = cm
  modified_base 14: mod_base = OTHER; note = 2-prime-fluorocytidine
  modified_base 15: mod_base = um
  modified_base 16: mod_base = OTHER; note = 2-prime-fluoroadenosine
  modified_base 17: mod_base = OTHER; note = 2-prime-O-methyladenosine
  modified_base 18: mod_base = OTHER; note = 2-prime-fluorocytidine
  modified_base 19: mod_base = um
  modified_base 20: mod_base = OTHER; note = 2-prime-fluorouridine
  source 1..20: mol_type = other RNA
tcaagttcgttccctaactt

SEQ ID NO: 259 - RNA, 20 nt, synthetic construct
  misc_feature 1..20: note = Description of Artificial Sequence: Synthetic oligonucleotide
  modified_base 1..3: mod_base = OTHER; note = Phosphorothioate internucleotide linkage
  modified_base 1: mod_base = um
  modified_base 2: mod_base = OTHER; note = 2-prime-fluorouridine
  modified_base 3: mod_base = cm
  modified_base 4: mod_base = OTHER; note = 2-prime-fluorouridine
  modified_base 5: mod_base = cm
  modified_base 6: mod_base = OTHER; note = 2-prime-fluorocytidine
  modified_base 7: mod_base = OTHER; note = 2-prime-O-methyladenosine
  modified_base 8: mod_base = OTHER; note = 2-prime-O-methyladenosine
  modified_base 8: mod_base = OTHER; note = 2-prime-fluoroguanosine
  modified_base 10: mod_base = OTHER; note = 2-prime-fluoroadenosine
  modified_base 11: mod_base = gm
  modified_base 12: mod_base = OTHER; note = 2-prime-fluoroadenosine
  modified_base 13..20: mod_base = OTHER; note = Phosphorothioate internucleotide linkage
  modified_base 13: mod_base = gm
  modified_base 14: mod_base = OTHER; note = 2-prime-fluoroadenosine
  modified_base 15: mod_base = gm
  modified_base 16: mod_base = OTHER; note = 2-prime-fluoroadenosine
  modified_base 17: mod_base = OTHER; note = 2-prime-O-methyladenosine
  modified_base 18: mod_base = OTHER; note = 2-prime-fluoroadenosine
  modified_base 19: mod_base = cm
  modified_base 20: mod_base = OTHER; note = 2-prime-fluoroadenosine
  source 1..20: mol_type = other RNA
ttctccagaagagagaaaca

SEQ ID NO: 260 - RNA, 20 nt, synthetic construct
  misc_feature 1..20: note = Description of Artificial Sequence: Synthetic oligonucleotide
  modified_base 1..3: mod_base = OTHER; note = Phosphorothioate internucleotide linkage
  modified_base 1: mod_base = um
  modified_base 2: mod_base = OTHER; note = 2-prime-fluorocytidine
  modified_base 3: mod_base = cm
  modified_base 4: mod_base = OTHER; note = 2-prime-fluoroadenosine
  modified_base 5: mod_base = gm
  modified_base 6: mod_base = OTHER; note = 2-prime-fluorouridine
  modified_base 7: mod_base = um
  modified_base 8: mod_base = OTHER; note = 2-prime-fluorouridine
  modified_base 9: mod_base = cm
  modified_base 10: mod_base = OTHER; note = 2-prime-fluorouridine
  modified_base 11: mod_base = cm
  modified_base 12: mod_base = OTHER; note = 2-prime-fluorocytidine
  modified_base 13..20: mod_base = OTHER; note = Phosphorothioate internucleotide linkage
  modified_base 13: mod_base = OTHER; note = 2-prime-O-methyladenosine
  modified_base 14: mod_base = OTHER; note = 2-prime-fluoroguanosine
  modified_base 15: mod_base = OTHER; note = 2-prime-O-methyladenosine
  modified_base 16: mod_base = OTHER; note = 2-prime-fluoroadenosine
  modified_base 17: mod_base = gm
  modified_base 18: mod_base = OTHER; note = 2-prime-fluoroadenosine
  modified_base 19: mod_base = gm
  modified_base 20: mod_base = OTHER; note = 2-prime-fluoroadenosine
  source 1..20: mol_type = other RNA
tccagtttctccagaagaga

SEQ ID NO: 261 - RNA, 20 nt, synthetic construct
  misc_feature 1..20: note = Description of Artificial Sequence: Synthetic oligonucleotide
  modified_base 1..3: mod_base = OTHER; note = Phosphorothioate internucleotide linkage
  modified_base 1: mod_base = um
  modified_base 2: mod_base = OTHER; note = 2-prime-fluorocytidine
  modified_base 3: mod_base = cm
  modified_base 4: mod_base = OTHER; note = 2-prime-fluoroadenosine
  modified_base 5: mod_base = OTHER; note = 2-prime-O-methyladenosine
  modified_base 6: mod_base = OTHER; note = 2-prime-fluoroguanosine
  modified_base 7: mod_base = um
  modified_base 8: mod_base = OTHER; note = 2-prime-fluorouridine
  modified_base 9: mod_base = cm
  modified_base 10: mod_base = OTHER; note = 2-prime-fluorouridine
  modified_base 11: mod_base = cm
  modified_base 12: mod_base = OTHER; note = 2-prime-fluorouridine
  modified_base 13..20: mod_base = OTHER; note = Phosphorothioate internucleotide linkage
  modified_base 13: mod_base = um
  modified_base 14: mod_base = OTHER; note = 2-prime-fluorocytidine
  modified_base 15: mod_base = OTHER; note = 2-prime-O-methyladenosine
  modified_base 16: mod_base = OTHER; note = 2-prime-fluorocytidine
  modified_base 17: mod_base = OTHER; note = 2-prime-O-methyladenosine
  modified_base 18: mod_base = OTHER; note = 2-prime-fluoroadenosine
  modified_base 19: mod_base = cm
  modified_base 20: mod_base = OTHER; note = 2-prime-fluoroadenosine
  source 1..20: mol_type = other RNA
tccaagttctcttcacaaca

SEQ ID NO: 262 - RNA, 20 nt, synthetic construct
  misc_feature 1..20: note = Description of Artificial Sequence: Synthetic oligonucleotide
  modified_base 1..3: mod_base = OTHER; note = Phosphorothioate internucleotide linkage
  modified_base 1: mod_base = um
  modified_base 2: mod_base = OTHER; note = 2-prime-fluorouridine
  modified_base 3: mod_base = gm
  modified_base 4: mod_base = OTHER; note = 2-prime-fluoroadenosine
  modified_base 5: mod_base = gm
  modified_base 6: mod_base = OTHER; note = 2-prime-fluoroguanosine
  modified_base 7: mod_base = OTHER; note = 2-prime-O-methyladenosine
  modified_base 8: mod_base = OTHER; note = 2-prime-fluoroguanosine
  modified_base 9: mod_base = gm
  modified_base 10: mod_base = OTHER; note = 2-prime-fluorouridine
  modified_base 11: mod_base = OTHER; note = 2-prime-O-methyladenosine
  modified_base 12: mod_base = OTHER; note = 2-prime-fluoroadenosine
  modified_base 13..20: mod_base = OTHER; note = Phosphorothioate internucleotide linkage
  modified_base 13: mod_base = cm
  modified_base 14: mod_base = OTHER; note = 2-prime-fluorocytidine
  modified_base 15: mod_base = cm
  modified_base 16: mod_base = OTHER; note = 2-prime-fluorouridine
  modified_base 17: mod_base = OTHER; note = 2-prime-O-methyladenosine
  modified_base 18: mod_base = OTHER; note = 2-prime-fluoroguanosine
  modified_base 19: mod_base = OTHER; note = 2-prime-O-methyladenosine
  modified_base 20: mod_base = OTHER; note = 2-prime-fluoroguanosine
  source 1..20: mol_type = other RNA
ttgaggaggtaaccctagag

SEQ ID NO: 263 - RNA, 20 nt, synthetic construct
  misc_feature 1..20: note = Description of Artificial Sequence: Synthetic oligonucleotide
  modified_base 1..3: mod_base = OTHER; note = Phosphorothioate internucleotide linkage
  modified_base 1: mod_base = um
  modified_base 2: mod_base = OTHER; note = 2-prime-fluorouridine
  modified_base 3: mod_base = OTHER; note = 2-prime-O-methyladenosine
  modified_base 4: mod_base = OTHER; note = 2-prime-fluorouridine
  modified_base 5: mod_base = gm
  modified_base 6: mod_base = OTHER; note = 2-prime-fluorouridine
  modified_base 7: mod_base = cm
  modified_base 8: mod_base = OTHER; note = 2-prime-fluoroadenosine
  modified_base 9: mod_base = um
  modified_base 10: mod_base = OTHER; note = 2-prime-fluorocytidine
  modified_base 11: mod_base = cm
  modified_base 12: mod_base = OTHER; note = 2-prime-fluoroadenosine
  modified_base 13..20: mod_base = OTHER; note = Phosphorothioate internucleotide linkage
  modified_base 13: mod_base = cm
  modified_base 14: mod_base = OTHER; note = 2-prime-fluorouridine
  modified_base 15: mod_base = OTHER; note = 2-prime-O-methyladenosine
  modified_base 16: mod_base = OTHER; note = 2-prime-fluorocytidine
  modified_base 17: mod_base = cm
  modified_base 18: mod_base = OTHER; note = 2-prime-fluorocytidine
  modified_base 19: mod_base = gm
  modified_base 20: mod_base = OTHER; note = 2-prime-fluorocytidine
  source 1..20: mol_type = other RNA
ttatgtcatccactacccgc

SEQ ID NO: 264 - RNA, 20 nt, synthetic construct
  misc_feature 1..20: note = Description of Artificial Sequence: Synthetic oligonucleotide
  modified_base 1..3: mod_base = OTHER; note = Phosphorothioate internucleotide linkage
  modified_base 1: mod_base = um
  modified_base 2: mod_base = OTHER; note = 2-prime-fluorouridine
  modified_base 3: mod_base = um
  modified_base 4: mod_base = OTHER; note = 2-prime-fluoroadenosine
  modified_base 5: mod_base = um
  modified_base 6: mod_base = OTHER; note = 2-prime-fluoroguanosine
  modified_base 7: mod_base = um
  modified_base 8: mod_base = OTHER; note = 2-prime-fluorocytidine
  modified_base 9: mod_base = OTHER; note = 2-prime-O-methyladenosine
  modified_base 10: mod_base = OTHER; note = 2-prime-fluorouridine
  modified_base 11: mod_base = cm
  modified_base 12: mod_base = OTHER; note = 2-prime-fluorocytidine
  modified_base 13..20: mod_base = OTHER; note = Phosphorothioate internucleotide linkage
  modified_base 13: mod_base = OTHER; note = 2-prime-O-methyladenosine
  modified_base 14: mod_base = OTHER; note = 2-prime-fluorocytidine
  modified_base 15: mod_base = um
  modified_base 16: mod_base = OTHER; note = 2-prime-fluoroadenosine
  modified_base 17: mod_base = cm
  modified_base 18: mod_base = OTHER; note = 2-prime-fluorocytidine
  modified_base 19: mod_base = cm
  modified_base 20: mod_base = OTHER; note = 2-prime-fluoroguanosine
  source 1..20: mol_type = other RNA
tttatgtcatccactacccg

SEQ ID NO: 265 - RNA, 20 nt, synthetic construct
  misc_feature 1..20: note = Description of Artificial Sequence: Synthetic oligonucleotide
  modified_base 1..3: mod_base = OTHER; note = Phosphorothioate internucleotide linkage
  modified_base 1: mod_base = um
  modified_base 2: mod_base = OTHER; note = 2-prime-fluorouridine
  modified_base 3: mod_base = OTHER; note = 2-prime-O-methyladenosine
  modified_base 4: mod_base = OTHER; note = 2-prime-fluoroadenosine
  modified_base 5: mod_base = OTHER; note = 2-prime-O-methyladenosine
  modified_base 6: mod_base = OTHER; note = 2-prime-fluoroadenosine
  modified_base 7: mod_base = gm
  modified_base 8: mod_base = OTHER; note = 2-prime-fluorocytidine
  modified_base 9: mod_base = OTHER; note = 2-prime-O-methyladenosine
  modified_base 10: mod_base = OTHER; note = 2-prime-fluorouridine
  modified_base 11: mod_base = um
  modified_base 12: mod_base = OTHER; note = 2-prime-fluoroadenosine
  modified_base 13..20: mod_base = OTHER; note = Phosphorothioate internucleotide linkage
  modified_base 13: mod_base = um
  modified_base 14: mod_base = OTHER; note = 2-prime-fluoroguanosine
  modified_base 15: mod_base = um
  modified_base 16: mod_base = OTHER; note = 2-prime-fluorocytidine
  modified_base 17: mod_base = OTHER; note = 2-prime-O-methyladenosine
  modified_base 18: mod_base = OTHER; note = 2-prime-fluorouridine
  modified_base 19: mod_base = cm
  modified_base 20: mod_base = OTHER; note = 2-prime-fluorocytidine
  source 1..20: mol_type = other RNA
ttaaaagcattatgtcatcc

SEQ ID NO: 266 - RNA, 20 nt, synthetic construct
  misc_feature 1..20: note = Description of Artificial Sequence: Synthetic oligonucleotide
  modified_base 1..3: mod_base = OTHER; note = Phosphorothioate internucleotide linkage
  modified_base 1: mod_base = um
  modified_base 2: mod_base = OTHER; note = 2-prime-fluorocytidine
  modified_base 3: mod_base = cm
  modified_base 4: mod_base = OTHER; note = 2-prime-fluoroadenosine
  modified_base 5: mod_base = um
  modified_base 6: mod_base = OTHER; note = 2-prime-fluorouridine
  modified_base 7: mod_base = gm
  modified_base 8: mod_base = OTHER; note = 2-prime-fluoroguanosine
  modified_base 9: mod_base = OTHER; note = 2-prime-O-methyladenosine
  modified_base 10: mod_base = OTHER; note = 2-prime-fluorouridine
  modified_base 11: mod_base = gm
  modified_base 12: mod_base = OTHER; note = 2-prime-fluorocytidine
  modified_base 13..20: mod_base = OTHER; note = Phosphorothioate internucleotide linkage
  modified_base 13: mod_base = gm
  modified_base 14: mod_base = OTHER; note = 2-prime-fluorouridine
  modified_base 15: mod_base = um
  modified_base 16: mod_base = OTHER; note = 2-prime-fluorocytidine
  modified_base 17: mod_base = OTHER; note = 2-prime-O-methyladenosine
  modified_base 18: mod_base = OTHER; note = 2-prime-fluorocytidine
  modified_base 19: mod_base = OTHER; note = 2-prime-O-methyladenosine
  modified_base 20: mod_base = OTHER; note = 2-prime-fluorocytidine
  source 1..20: mol_type = other RNA
tccattggatgcgttcacac

SEQ ID NO: 267 - RNA, 20 nt, synthetic construct
  misc_feature 1..20: note = Description of Artificial Sequence: Synthetic oligonucleotide
  modified_base 1..3: mod_base = OTHER; note = Phosphorothioate internucleotide linkage
  modified_base 1: mod_base = um
  modified_base 2: mod_base = OTHER; note = 2-prime-fluorouridine
  modified_base 3: mod_base = cm
  modified_base 4: mod_base = OTHER; note = 2-prime-fluoroadenosine
  modified_base 5: mod_base = cm
  modified_base 6: mod_base = OTHER; note = 2-prime-fluoroadenosine
  modified_base 7: mod_base = gm
  modified_base 8: mod_base = OTHER; note = 2-prime-fluoroguanosine
  modified_base 9: mod_base = cm
  modified_base 10: mod_base = OTHER; note = 2-prime-fluorouridine
  modified_base 11: mod_base = gm
  modified_base 12: mod_base = OTHER; note = 2-prime-fluorocytidine
  modified_base 13..20: mod_base = OTHER; note = Phosphorothioate internucleotide linkage
  modified_base 13: mod_base = um
  modified_base 14: mod_base = OTHER; note = 2-prime-fluorouridine
  modified_base 15: mod_base = cm
  modified_base 16: mod_base = OTHER; note = 2-prime-fluoroadenosine
  modified_base 17: mod_base = OTHER; note = 2-prime-O-methyladenosine
  modified_base 18: mod_base = OTHER; note = 2-prime-fluoroguanosine
  modified_base 19: mod_base = um
  modified_base 20: mod_base = OTHER; note = 2-prime-fluoroguanosine
  source 1..20: mol_type = other RNA
ttcacaggctgcttcaagtg

SEQ ID NO: 268 - RNA, 20 nt, synthetic construct
  misc_feature 1..20: note = Description of Artificial Sequence: Synthetic oligonucleotide
  modified_base 1..3: mod_base = OTHER; note = Phosphorothioate internucleotide linkage
  modified_base 1: mod_base = um
  modified_base 2: mod_base = OTHER; note = 2-prime-fluorocytidine
  modified_base 3: mod_base = um
  modified_base 4: mod_base = OTHER; note = 2-prime-fluoroadenosine
  modified_base 5: mod_base = OTHER; note = 2-prime-O-methyladenosine
  modified_base 6: mod_base = OTHER; note = 2-prime-fluoroadenosine
  modified_base 7: mod_base = um
  modified_base 8: mod_base = OTHER; note = 2-prime-fluoroguanosine
  modified_base 9: mod_base = OTHER; note = 2-prime-O-methyladenosine
  modified_base 10: mod_base = OTHER; note = 2-prime-fluoroadenosine
  modified_base 11: mod_base = OTHER; note = 2-prime-O-methyladenosine
  modified_base 12: mod_base = OTHER; note = 2-prime-fluorocytidine
  modified_base 13..20: mod_base = OTHER; note = Phosphorothioate internucleotide linkage
  modified_base 13: mod_base = gm
  modified_base 14: mod_base = OTHER; note = 2-prime-fluorocytidine
  modified_base 15: mod_base = cm
  modified_base 16: mod_base = OTHER; note = 2-prime-fluoroadenosine
  modified_base 17: mod_base = gm
  modified_base 18: mod_base = OTHER; note = 2-prime-fluoroguanosine
  modified_base 19: mod_base = OTHER; note = 2-prime-O-methyladenosine
  modified_base 20: mod_base = OTHER; note = 2-prime-fluoroguanosine
  source 1..20: mol_type = other RNA
tctaaatgaaacgccaggag

SEQ ID NO: 269 - RNA, 20 nt, synthetic construct
  misc_feature 1..20: note = Description of Artificial Sequence: Synthetic oligonucleotide
  modified_base 1..3: mod_base = OTHER; note = Phosphorothioate internucleotide linkage
  modified_base 1: mod_base = um
  modified_base 2: mod_base = OTHER; note = 2-prime-fluorouridine
  modified_base 3: mod_base = cm
  modified_base 4: mod_base = OTHER; note = 2-prime-fluorouridine
  modified_base 5: mod_base = OTHER; note = 2-prime-O-methyladenosine
  modified_base 6: mod_base = OTHER; note = 2-prime-fluorouridine
  modified_base 7: mod_base = cm
  modified_base 8: mod_base = OTHER; note = 2-prime-fluorouridine
  modified_base 9: mod_base = OTHER; note = 2-prime-O-methyladenosine
  modified_base 10: mod_base = OTHER; note = 2-prime-fluorouridine
  modified_base 11: mod_base = OTHER; note = 2-prime-O-methyladenosine
  modified_base 12: mod_base = OTHER; note = 2-prime-fluorouridine
  modified_base 13..20: mod_base = OTHER; note = Phosphorothioate internucleotide linkage
  modified_base 13: mod_base = gm
  modified_base 14: mod_base = OTHER; note = 2-prime-fluorouridine
  modified_base 15: mod_base = OTHER; note = 2-prime-O-methyladenosine
  modified_base 16: mod_base = OTHER; note = 2-prime-fluorouridine
  modified_base 17: mod_base = cm
  modified_base 18: mod_base = OTHER; note = 2-prime-fluoroguanosine
  modified_base 19: mod_base = cm
  modified_base 20: mod_base = OTHER; note = 2-prime-fluorocytidine
  source 1..20: mol_type = other RNA
tacaaactaaatgaaacgcc

SEQ ID NO: 270 - RNA, 20 nt, synthetic construct
  misc_feature 1..20: note = Description of Artificial Sequence: Synthetic oligonucleotide
  modified_base 1..3: mod_base = OTHER; note = Phosphorothioate internucleotide linkage
  modified_base 1: mod_base = um
  modified_base 2: mod_base = OTHER; note = 2-prime-fluorocytidine
  modified_base 3: mod_base = um
  modified_base 4: mod_base = OTHER; note = 2-prime-fluoroadenosine
  modified_base 5: mod_base = cm
  modified_base 6: mod_base = OTHER; note = 2-prime-fluoroadenosine
  modified_base 7: mod_base = cm
  modified_base 8: mod_base = OTHER; note = 2-prime-fluorouridine
  modified_base 9: mod_base = OTHER; note = 2-prime-O-methyladenosine
  modified_base 10: mod_base = OTHER; note = 2-prime-fluorocytidine
  modified_base 11: mod_base = OTHER; note = 2-prime-O-methyladenosine
  modified_base 12: mod_base = OTHER; note = 2-prime-fluorocytidine
  modified_base 13..20: mod_base = OTHER; note = Phosphorothioate internucleotide linkage
  modified_base 13: mod_base = cm
  modified_base 14: mod_base = OTHER; note = 2-prime-fluoroadenosine
  modified_base 15: mod_base = cm
  modified_base 16: mod_base = OTHER; note = 2-prime-fluoroadenosine
  modified_base 17: mod_base = OTHER; note = 2-prime-O-methyladenosine
  modified_base 18: mod_base = OTHER; note = 2-prime-fluoroadenosine
  modified_base 19: mod_base = cm
  modified_base 20: mod_base = OTHER; note = 2-prime-fluorouridine
  source 1..20: mol_type = other RNA
tctacactacaccacaaact

SEQ ID NO: 271 - RNA, 20 nt, synthetic construct
  misc_feature 1..20: note = Description of Artificial Sequence: Synthetic oligonucleotide
  modified_base 1..3: mod_base = OTHER; note = Phosphorothioate internucleotide linkage
  modified_base 1: mod_base = um
  modified_base 2: mod_base = OTHER; note = 2-prime-fluorouridine
  modified_base 3: mod_base = OTHER; note = 2-prime-O-methyladenosine
  modified_base 4: mod_base = OTHER; note = 2-prime-fluoroadenosine
  modified_base 5: mod_base = cm
  modified_base 6: mod_base = OTHER; note = 2-prime-fluorouridine
  modified_base 7: mod_base = OTHER; note = 2-prime-O-methyladenosine
  modified_base 8: mod_base = OTHER; note = 2-prime-fluorocytidine
  modified_base 9: mod_base = OTHER; note = 2-prime-O-methyladenosine
  modified_base 10: mod_base = OTHER; note = 2-prime-fluorocytidine
  modified_base 11: mod_base = um
  modified_base 12: mod_base = OTHER; note = 2-prime-fluoroadenosine
  modified_base 13..20: mod_base = OTHER; note = Phosphorothioate internucleotide linkage
  modified_base 13: mod_base = cm
  modified_base 14: mod_base = OTHER; note = 2-prime-fluoroadenosine
  modified_base 15: mod_base = cm
  modified_base 16: mod_base = OTHER; note = 2-prime-fluorocytidine
  modified_base 17: mod_base = OTHER; note = 2-prime-O-methyladenosine
  modified_base 18: mod_base = OTHER; note = 2-prime-fluorocytidine
  modified_base 19: mod_base = OTHER; note = 2-prime-O-methyladenosine
  modified_base 20: mod_base = OTHER; note = 2-prime-fluoroadenosine
  source 1..20: mol_type = other RNA
ttaactacactacaccacaa

SEQ ID NO: 272 - RNA, 20 nt, synthetic construct
  misc_feature 1..20: note = Description of Artificial Sequence: Synthetic oligonucleotide
  modified_base 1..3: mod_base = OTHER; note = Phosphorothioate internucleotide linkage
  modified_base 1: mod_base = um
  modified_base 2: mod_base = OTHER; note = 2-prime-fluorouridine
  modified_base 3: mod_base = um
  modified_base 4: mod_base = OTHER; note = 2-prime-fluoroadenosine
  modified_base 5: mod_base = OTHER; note = 2-prime-O-methyladenosine
  modified_base 6: mod_base = OTHER; note = 2-prime-fluorocytidine
  modified_base 7: mod_base = um
  modified_base 8: mod_base = OTHER; note = 2-prime-fluoroadenosine
  modified_base 9: mod_base = cm
  modified_base 10: mod_base = OTHER; note = 2-prime-fluoroadenosine
  modified_base 11: mod_base = cm
  modified_base 12: mod_base = OTHER; note = 2-prime-fluorouridine
  modified_base 13..20: mod_base = OTHER; note = Phosphorothioate internucleotide linkage
  modified_base 13: mod_base = OTHER; note = 2-prime-O-methyladenosine
  modified_base 14: mod_base = OTHER; note = 2-prime-fluorocytidine
  modified_base 15: mod_base = OTHER; note = 2-prime-O-methyladenosine
  modified_base 16: mod_base = OTHER; note = 2-prime-fluorocytidine
  modified_base 17: mod_base = cm
  modified_base 18: mod_base = OTHER; note = 2-prime-fluoroadenosine
  modified_base 19: mod_base = cm
  modified_base 20: mod_base = OTHER; note = 2-prime-fluoroadenosine
  source 1..20: mol_type = other RNA
tttaactacactacaccaca

SEQ ID NO: 273 - RNA, 20 nt, synthetic construct
  misc_feature 1..20: note = Description of Artificial Sequence: Synthetic oligonucleotide
  modified_base 1..3: mod_base = OTHER; note = Phosphorothioate internucleotide linkage
  modified_base 1: mod_base = um
  modified_base 2: mod_base = OTHER; note = 2-prime-fluorouridine
  modified_base 3: mod_base = um
  modified_base 4: mod_base = OTHER; note = 2-prime-fluorouridine
  modified_base 5: mod_base = OTHER; note = 2-prime-O-methyladenosine
  modified_base 6: mod_base = OTHER; note = 2-prime-fluoroadenosine
  modified_base 7: mod_base = cm
  modified_base 8: mod_base = OTHER; note = 2-prime-fluorouridine
  modified_base 9: mod_base = OTHER; note = 2-prime-O-methyladenosine
  modified_base 10: mod_base = OTHER; note = 2-prime-fluorocytidine
  modified_base 11: mod_base = OTHER; note = 2-prime-O-methyladenosine
  modified_base 12: mod_base = OTHER; note = 2-prime-fluorocytidine
  modified_base 13..20: mod_base = OTHER; note = Phosphorothioate internucleotide linkage
  modified_base 13: mod_base = um
  modified_base 14: mod_base = OTHER; note = 2-prime-fluoroadenosine
  modified_base 15: mod_base = cm
  modified_base 16: mod_base = OTHER; note = 2-prime-fluoroadenosine
  modified_base 17: mod_base = cm
  modified_base 18: mod_base = OTHER; note = 2-prime-fluorocytidine
  modified_base 19: mod_base = OTHER; note = 2-prime-O-methyladenosine
  modified_base 20: mod_base = OTHER; note = 2-prime-fluorocytidine
  source 1..20: mol_type = other RNA
ttttaactacactacaccac

SEQ ID NO: 274 - RNA, 20 nt, synthetic construct
  misc_feature 1..20: note = Description of Artificial Sequence: Synthetic oligonucleotide
  modified_base 1..3: mod_base = OTHER; note = Phosphorothioate internucleotide linkage
  modified_base 1: mod_base = um
  modified_base 2: mod_base = OTHER; note = 2-prime-fluoroadenosine
  modified_base 3: mod_base = OTHER; note = 2-prime-O-methyladenosine
  modified_base 4: mod_base = OTHER; note = 2-prime-fluorocytidine
  modified_base 5: mod_base = cm
  modified_base 6: mod_base = OTHER; note = 2-prime-fluorouridine
  modified_base 7: mod_base = gm
  modified_base 8: mod_base = OTHER; note = 2-prime-fluoroguanosine
  modified_base 9: mod_base = um
  modified_base 10: mod_base = OTHER; note = 2-prime-fluorouridine
  modified_base 11: mod_base = um
  modified_base 12: mod_base = OTHER; note = 2-prime-fluoroadenosine
  modified_base 13..20: mod_base = OTHER; note = Phosphorothioate internucleotide linkage
  modified_base 13: mod_base = OTHER; note = 2-prime-O-methyladenosine
  modified_base 14: mod_base = OTHER; note = 2-prime-fluorocytidine
  modified_base 15: mod_base = um
  modified_base 16: mod_base = OTHER; note = 2-prime-fluoroadenosine
  modified_base 17: mod_base = cm
  modified_base 18: mod_base = OTHER; note = 2-prime-fluoroadenosine
  modified_base 19: mod_base = cm
  modified_base 20: mod_base = OTHER; note = 2-prime-fluorouridine
  source 1..20: mol_type = other RNA
taacctggtttaactacact

SEQ ID NO: 275 - RNA, 20 nt, synthetic construct
  misc_feature 1..20: note = Description of Artificial Sequence: Synthetic oligonucleotide
  modified_base 1..3: mod_base = OTHER; note = Phosphorothioate internucleotide linkage
  modified_base 1: mod_base = um
  modified_base 2: mod_base = OTHER; note = 2-prime-fluorouridine
  modified_base 3: mod_base = OTHER; note = 2-prime-O-methyladenosine
  modified_base 4: mod_base = OTHER; note = 2-prime-fluoroadenosine
  modified_base 5: mod_base = OTHER; note = 2-prime-O-methyladenosine
  modified_base 6: mod_base = OTHER; note = 2-prime-fluoroadenosine
  modified_base 7: mod_base = cm
  modified_base 8: mod_base = OTHER; note = 2-prime-fluorocytidine
  modified_base 9: mod_base = um
  modified_base 10: mod_base = OTHER; note = 2-prime-fluoroguanosine
  modified_base 11: mod_base = gm
  modified_base 12: mod_base = OTHER; note = 2-prime-fluorouridine
  modified_base 13..20: mod_base = OTHER; note = Phosphorothioate internucleotide linkage
  modified_base 13: mod_base = um
  modified_base 14: mod_base = OTHER; note = 2-prime-fluorouridine
  modified_base 15: mod_base = OTHER; note = 2-prime-O-methyladenosine
  modified_base 16: mod_base = OTHER; note = 2-prime-fluoroadenosine
  modified_base 17: mod_base = cm
  modified_base 18: mod_base = OTHER; note = 2-prime-fluorouridine
  modified_base 19: mod_base = OTHER; note = 2-prime-O-methyladenosine
  modified_base 20: mod_base = OTHER; note = 2-prime-fluorocytidine
  source 1..20: mol_type = other RNA
ttaaaacctggtttaactac

SEQ ID NO: 276 - RNA, 20 nt, synthetic construct
  misc_feature 1..20: note = Description of Artificial Sequence: Synthetic oligonucleotide
  modified_base 1..3: mod_base = OTHER; note = Phosphorothioate internucleotide linkage
  modified_base 1: mod_base = um
  modified_base 2: mod_base = OTHER; note = 2-prime-fluorouridine
  modified_base 3: mod_base = um
  modified_base 4: mod_base = OTHER; note = 2-prime-fluoroadenosine
  modified_base 5: mod_base = OTHER; note = 2-prime-O-methyladenosine
  modified_base 6: mod_base = OTHER; note = 2-prime-fluoroadenosine
  modified_base 7: mod_base = OTHER; note = 2-prime-O-methyladenosine
  modified_base 8: mod_base = OTHER; note = 2-prime-fluorocytidine
  modified_base 9: mod_base = cm
  modified_base 10: mod_base = OTHER; note = 2-prime-fluorouridine
  modified_base 11: mod_base = gm
  modified_base 12: mod_base = OTHER; note = 2-prime-fluoroguanosine
  modified_base 13..20: mod_base = OTHER; note = Phosphorothioate internucleotide linkage
  modified_base 13: mod_base = um
  modified_base 14: mod_base = OTHER; note = 2-prime-fluorouridine
  modified_base 15: mod_base = um
  modified_base 16: mod_base = OTHER; note = 2-prime-fluoroadenosine
  modified_base 17: mod_base = OTHER; note = 2-prime-O-methyladenosine
  modified_base 18: mod_base = OTHER; note = 2-prime-fluorocytidine
  modified_base 19: mod_base = um
  modified_base 20: mod_base = OTHER; note = 2-prime-fluoroadenosine
  source 1..20: mol_type = other RNA
tttaaaacctggtttaacta

SEQ ID NO: 277 - RNA, 20 nt, synthetic construct
  misc_feature 1..20: note = Description of Artificial Sequence: Synthetic oligonucleotide
  modified_base 1..3: mod_base = OTHER; note = Phosphorothioate internucleotide linkage
  modified_base 1: mod_base = um
  modified_base 2: mod_base = OTHER; note = 2-prime-fluorocytidine
  modified_base 3: mod_base = OTHER; note = 2-prime-O-methyladenosine
  modified_base 4: mod_base = OTHER; note = 2-prime-fluorocytidine
  modified_base 5: mod_base = cm
  modified_base 6: mod_base = OTHER; note = 2-prime-fluorouridine
  modified_base 7: mod_base = cm
  modified_base 8: mod_base = OTHER; note = 2-prime-fluorouridine
  modified_base 9: mod_base = cm
  modified_base 10: mod_base = OTHER; note = 2-prime-fluorouridine
  modified_base 11: mod_base = gm
  modified_base 12: mod_base = OTHER; note = 2-prime-fluoroguanosine
  modified_base 13..20: mod_base = OTHER; note = Phosphorothioate internucleotide linkage
  modified_base 13: mod_base = cm
  modified_base 14: mod_base = OTHER; note = 2-prime-fluorouridine
  modified_base 15: mod_base = OTHER; note = 2-prime-O-methyladenosine
  modified_base 16: mod_base = OTHER; note = 2-prime-fluorouridine
  modified_base 17: mod_base = gm
  modified_base 18: mod_base = OTHER; note = 2-prime-fluorocytidine
  modified_base 19: mod_base = um
  modified_base 20: mod_base = OTHER; note = 2-prime-fluorouridine
  source 1..20: mol_type = other RNA
tcacctctctggctatgctt

SEQ ID NO: 278 - RNA, 20 nt, synthetic construct
  misc_feature 1..20: note = Description of Artificial Sequence: Synthetic oligonucleotide
  modified_base 1..3: mod_base = OTHER; note = Phosphorothioate internucleotide linkage
  modified_base 1: mod_base = um
  modified_base 2: mod_base = OTHER; note = 2-prime-fluorocytidine
  modified_base 3: mod_base = um
  modified_base 4: mod_base = OTHER; note = 2-prime-fluorocytidine
  modified_base 5: mod_base = gm
  modified_base 6: mod_base = OTHER; note = 2-prime-fluorouridine
  modified_base 7: mod_base = cm
  modified_base 8: mod_base = OTHER; note = 2-prime-fluorocytidine
  modified_base 9: mod_base = gm
  modified_base 10: mod_base = OTHER; note = 2-prime-fluoroadenosine
  modified_base 11: mod_base = cm
  modified_base 12: mod_base = OTHER; note = 2-prime-fluorouridine
  modified_base 13..20: mod_base = OTHER; note = Phosphorothioate internucleotide linkage
  modified_base 13: mod_base = gm
  modified_base 14: mod_base = OTHER; note = 2-prime-fluorocytidine
  modified_base 15: mod_base = cm
  modified_base 16: mod_base = OTHER; note = 2-prime-fluorouridine
  modified_base 17: mod_base = gm
  modified_base 18: mod_base = OTHER; note = 2-prime-fluorocytidine
  modified_base 19: mod_base = gm
  modified_base 20: mod_base = OTHER; note = 2-prime-fluoroguanosine
  source 1..20: mol_type = other RNA
tctcatccaactgcctgcag

SEQ ID NO: 279 - RNA, 20 nt, synthetic construct
  misc_feature 1..20: note = Description of Artificial Sequence: Synthetic oligonucleotide
  modified_base 1..3: mod_base = OTHER; note = Phosphorothioate internucleotide linkage
  modified_base 1: mod_base = um
  modified_base 2: mod_base = OTHER; note = 2-prime-fluoroguanosine
  modified_base 3: mod_base = um
  modified_base 4: mod_base = OTHER; note = 2-prime-fluoroadenosine
  modified_base 5: mod_base = cm
  modified_base 6: mod_base = OTHER; note = 2-prime-fluorouridine
  modified_base 7: mod_base = um
  modified_base 8: mod_base = OTHER; note = 2-prime-fluoroguanosine
  modified_base 9: mod_base = OTHER; note = 2-prime-O-methyladenosine
  modified_base 10: mod_base = OTHER; note = 2-prime-fluorocytidine
  modified_base 11: mod_base = OTHER; note = 2-prime-O-methyladenosine
  modified_base 12: mod_base = OTHER; note = 2-prime-fluoroadenosine
  modified_base 13..20: mod_base = OTHER; note = Phosphorothioate internucleotide linkage
  modified_base 13: mod_base = OTHER; note = 2-prime-O-methyladenosine
  modified_base 14: mod_base = OTHER; note = 2-prime-fluorouridine
  modified_base 15: mod_base = OTHER; note = 2-prime-O-methyladenosine
  modified_base 16: mod_base = OTHER; note = 2-prime-fluorocytidine
  modified_base 17: mod_base = OTHER; note = 2-prime-O-methyladenosine
  modified_base 18: mod_base = OTHER; note = 2-prime-fluoroadenosine
  modified_base 19: mod_base = cm
  modified_base 20: mod_base = OTHER; note = 2-prime-fluorouridine
  source 1..20: mol_type = other RNA
tgtacttgacaaatacaact

SEQ ID NO: 280 - RNA, 15 nt, synthetic construct
  misc_feature 1..15: note = Description of Artificial Sequence: Synthetic oligonucleotide
  modified_base 1: mod_base = OTHER; note = 2-prime-fluorouridine
  modified_base 1..3: mod_base = OTHER; note = Phosphorothioate internucleotide linkage
  modified_base 2: mod_base = gm
  modified_base 3: mod_base = OTHER; note = 2-prime-fluorocytidine
  modified_base 4: mod_base = gm
  modified_base 5: mod_base = OTHER; note = 2-prime-fluoroadenosine
  modified_base 6: mod_base = OTHER; note = 2-prime-O-methyladenosine
  modified_base 7: mod_base = OTHER; note = 2-prime-fluoroguanosine
  modified_base 8: mod_base = um
  modified_base 9: mod_base = OTHER; note = 2-prime-fluorouridine
  modified_base 10: mod_base = OTHER; note = 2-prime-O-methyladenosine
  modified_base 11: mod_base = OTHER; note = 2-prime-fluoroguanosine
  modified_base 12: mod_base = gm
  modified_base 13..15: mod_base = OTHER; note = Phosphorothioate internucleotide linkage
  modified_base 13: mod_base = OTHER; note = 2-prime-fluoroguanosine
  modified_base 14: mod_base = OTHER; note = 2-prime-O-methyladenosine
  modified_base 15: mod_base = OTHER; note = 2-prime-fluoroadenosine
  source 1..15: mol_type = other RNA
tgcgaagttagggaa

SEQ ID NO: 281 - RNA, 15 nt, synthetic construct
  misc_feature 1..15: note = Description of Artificial Sequence: Synthetic oligonucleotide
  modified_base 1..3: mod_base = OTHER; note = Phosphorothioate internucleotide linkage
  modified_base 1: mod_base = OTHER; note = 2-prime-fluorouridine
  modified_base 2: mod_base = OTHER; note = 2-prime-O-methyladenosine
  modified_base 3: mod_base = OTHER; note = 2-prime-fluoroguanosine
  modified_base 4: mod_base = gm
  modified_base 5: mod_base = OTHER; note = 2-prime-fluoroguanosine
  modified_base 6: mod_base = OTHER; note = 2-prime-O-methyladenosine
  modified_base 7: mod_base = OTHER; note = 2-prime-fluoroadenosine
  modified_base 8: mod_base = cm
  modified_base 9: mod_base = OTHER; note = 2-prime-fluoroguanosine
  modified_base 10: mod_base = OTHER; note = 2-prime-O-methyladenosine
  modified_base 11: mod_base = OTHER; note = 2-prime-fluoroadenosine
  modified_base 12: mod_base = cm
  modified_base 13..15: mod_base = OTHER; note = Phosphorothioate internucleotide linkage
  modified_base 13: mod_base = OTHER; note = 2-prime-fluorouridine
  modified_base 14: mod_base = um
  modified_base 15: mod_base = OTHER; note = 2-prime-fluoroadenosine
  source 1..15: mol_type = other RNA
tagggaacgaactta

SEQ ID NO: 282 - RNA, 15 nt, synthetic construct
  misc_feature 1..15: note = Description of Artificial Sequence: Synthetic oligonucleotide
  modified_base 1..3: mod_base = OTHER; note = Phosphorothioate internucleotide linkage
  modified_base 1: mod_base = OTHER; note = 2-prime-fluoroadenosine
  modified_base 2: mod_base = gm
  modified_base 3: mod_base = OTHER; note = 2-prime-fluoroguanosine
  modified_base 4: mod_base = gm
  modified_base 5: mod_base = OTHER; note = 2-prime-fluoroadenosine
  modified_base 6: mod_base = OTHER; note = 2-prime-O-methyladenosine
  modified_base 7: mod_base = OTHER; note = 2-prime-fluorocytidine
  modified_base 8: mod_base = gm
  modified_base 9: mod_base = OTHER; note = 2-prime-fluoroadenosine
  modified_base 10: mod_base = OTHER; note = 2-prime-O-methyladenosine
  modified_base 11: mod_base = OTHER; note = 2-prime-fluorocytidine
  modified_base 12: mod_base = um
  modified_base 13..15: mod_base = OTHER; note = Phosphorothioate internucleotide linkage
  modified_base 13: mod_base = OTHER; note = 2-prime-fluorouridine
  modified_base 14: mod_base = gm
  modified_base 15: mod_base = OTHER; note = 2-prime-fluoroadenosine
  source 1..15: mol_type = other RNA
agggaacgaacttga

SEQ ID NO: 283 - RNA, 15 nt, synthetic construct
  misc_feature 1..15: note = Description of Artificial Sequence: Synthetic oligonucleotide
  modified_base 1..3: mod_base = OTHER; note = Phosphorothioate internucleotide linkage
  modified_base 1: mod_base = OTHER; note = 2-prime-fluorocytidine
  modified_base 2: mod_base = um
  modified_base 3: mod_base = OTHER; note = 2-prime-fluorocytidine
  modified_base 4: mod_base = um
  modified_base 5: mod_base = OTHER; note = 2-prime-fluorocytidine
  modified_base 6: mod_base = um
  modified_base 7: mod_base = OTHER; note = 2-prime-fluorouridine
  modified_base 8: mod_base = cm
  modified_base 9: mod_base = OTHER; note = 2-prime-fluorouridine
  modified_base 10: mod_base = gm
  modified_base 11: mod_base = OTHER; note = 2-prime-fluoroguanosine
  modified_base 12: mod_base = OTHER; note = 2-prime-O-methyladenosine
  modified_base 13..15: mod_base = OTHER; note = Phosphorothioate internucleotide linkage
  modified_base 13: mod_base = OTHER; note = 2-prime-fluoroguanosine
  modified_base 13: mod_base = OTHER; note = 2-prime-fluoroguanosine
  modified_base 14: mod_base = OTHER; note = 2-prime-O-methyladenosine
  modified_base 15: mod_base = OTHER; note = 2-prime-fluoroadenosine
  source 1..15: mol_type = other RNA
ctctcttctggagaa

SEQ ID NO: 284 - RNA, 15 nt, synthetic construct
  misc_feature 1..15: note = Description of Artificial Sequence: Synthetic oligonucleotide
  modified_base 1..3: mod_base = OTHER; note = Phosphorothioate internucleotide linkage
  modified_base 1: mod_base = OTHER; note = 2-prime-fluorouridine
  modified_base 2: mod_base = cm
  modified_base 3: mod_base = OTHER; note = 2-prime-fluorouridine
  modified_base 4: mod_base = gm
  modified_base 5: mod_base = OTHER; note = 2-prime-fluoroguanosine
  modified_base 6: mod_base = OTHER; note = 2-prime-O-methyladenosine
  modified_base 7: mod_base = OTHER; note = 2-prime-fluoroguanosine
  modified_base 8: mod_base = OTHER; note = 2-prime-O-methyladenosine
  modified_base 9: mod_base = OTHER; note = 2-prime-fluoroadenosine
  modified_base 10: mod_base = OTHER; note = 2-prime-O-methyladenosine
  modified_base 11: mod_base = OTHER; note = 2-prime-fluorocytidine
  modified_base 12: mod_base = um
  modified_base 13..15: mod_base = OTHER; note = Phosphorothioate internucleotide linkage
  modified_base 13: mod_base = OTHER; note = 2-prime-fluoroguanosine
  modified_base 14: mod_base = gm
  modified_base 15: mod_base = OTHER; note = 2-prime-fluoroadenosine
  source 1..15: mol_type = other RNA
tctggagaaactgga

SEQ ID NO: 285 - RNA, 15 nt, synthetic construct
  misc_feature 1..15: note = Description of Artificial Sequence: Synthetic oligonucleotide
  modified_base 1..3: mod_base = OTHER; note = Phosphorothioate internucleotide linkage
  modified_base 1: mod_base = OTHER; note = 2-prime-fluorouridine
  modified_base 2: mod_base = gm
  modified_base 3: mod_base = OTHER; note = 2-prime-fluoroadenosine
  modified_base 4: mod_base = OTHER; note = 2-prime-O-methyladenosine
  modified_base 5: mod_base = OTHER; note = 2-prime-fluoroguanosine
  modified_base 6: mod_base = OTHER; note = 2-prime-O-methyladenosine
  modified_base 7: mod_base = OTHER; note = 2-prime-fluoroguanosine
  modified_base 8: mod_base = OTHER; note = 2-prime-O-methyladenosine
  modified_base 9: mod_base = OTHER; note = 2-prime-fluoroadenosine
  modified_base 10: mod_base = cm
  modified_base 11: mod_base = OTHER; note = 2-prime-fluorouridine
  modified_base 12: mod_base = um
  modified_base 13..15: mod_base = OTHER; note = Phosphorothioate internucleotide linkage
  modified_base 13: mod_base = OTHER; note = 2-prime-fluoroguanosine
  modified_base 14: mod_base = gm
  modified_base 15: mod_base = OTHER; note = 2-prime-fluoroadenosine
  source 1..15: mol_type = other RNA
tgaagagaacttgga

SEQ ID NO: 286 - RNA, 15 nt, synthetic construct
  misc_feature 1..15: note = Description of Artificial Sequence: Synthetic oligonucleotide
  modified_base 1..3: mod_base = OTHER; note = Phosphorothioate internucleotide linkage
  modified_base 1: mod_base = OTHER; note = 2-prime-fluoroguanosine
  modified_base 2: mod_base = gm
  modified_base 3: mod_base = OTHER; note = 2-prime-fluoroguanosine
  modified_base 4: mod_base = um
  modified_base 5: mod_base = OTHER; note = 2-prime-fluorouridine
  modified_base 6: mod_base = OTHER; note = 2-prime-O-methyladenosine
  modified_base 7: mod_base = OTHER; note = 2-prime-fluorocytidine
  modified_base 8: mod_base = cm
  modified_base 9: mod_base = OTHER; note = 2-prime-fluorouridine
  modified_base 10: mod_base = cm
  modified_base 11: mod_base = OTHER; note = 2-prime-fluorocytidine
  modified_base 12: mod_base = um
  modified_base 13..15: mod_base = OTHER; note = Phosphorothioate internucleotide linkage
  modified_base 13: mod_base = OTHER; note = 2-prime-fluorocytidine
  modified_base 14: mod_base = OTHER; note = 2-prime-O-methyladenosine
  modified_base 15: mod_base = OTHER; note = 2-prime-fluoroadenosine
  source 1..15: mol_type = other RNA
gggttacctcctcaa

SEQ ID NO: 287 - RNA, 15 nt, synthetic construct
  misc_feature 1..15: note = Description of Artificial Sequence: Synthetic oligonucleotide
  modified_base 1..3: mod_base = OTHER; note = Phosphorothioate internucleotide linkage
  modified_base 1: mod_base = OTHER; note = 2-prime-fluorouridine
  modified_base 2: mod_base = OTHER; note = 2-prime-O-methyladenosine
  modified_base 3: mod_base = OTHER; note = 2-prime-fluoroguanosine
  modified_base 4: mod_base = um
  modified_base 5: mod_base = OTHER; note = 2-prime-fluoroguanosine
  modified_base 6: mod_base = gm
  modified_base 7: mod_base = OTHER; note = 2-prime-fluoroadenosine
  modified_base 8: mod_base = um
  modified_base 9: mod_base = OTHER; note = 2-prime-fluoroguanosine
  modified_base 10: mod_base = OTHER; note = 2-prime-O-methyladenosine
  modified_base 11: mod_base = OTHER; note = 2-prime-fluorocytidine
  modified_base 12: mod_base = OTHER; note = 2-prime-O-methyladenosine
  modified_base 13..15: mod_base = OTHER; note = Phosphorothioate internucleotide linkage
  modified_base 13: mod_base = OTHER; note = 2-prime-fluorouridine
  modified_base 14: mod_base = OTHER; note = 2-prime-O-methyladenosine
  modified_base 15: mod_base = OTHER; note = 2-prime-fluoroadenosine
  source 1..15: mol_type = other RNA
tagtggatgacataa

SEQ ID NO: 288 - RNA, 15 nt, synthetic construct
  misc_feature 1..15: note = Description of Artificial Sequence: Synthetic oligonucleotide
  modified_base 1..3: mod_base = OTHER; note = Phosphorothioate internucleotide linkage
  modified_base 1: mod_base = OTHER; note = 2-prime-fluoroadenosine
  modified_base 2: mod_base = gm
  modified_base 3: mod_base = OTHER; note = 2-prime-fluorouridine
  modified_base 4: mod_base = gm
  modified_base 5: mod_base = OTHER; note = 2-prime-fluoroguanosine
  modified_base 6: mod_base = OTHER; note = 2-prime-O-methyladenosine
  modified_base 7: mod_base = OTHER; note = 2-prime-fluorouridine
  modified_base 8: mod_base = gm
  modified_base 9: mod_base = OTHER; note = 2-prime-fluoroadenosine
  modified_base 10: mod_base = cm
  modified_base 11: mod_base = OTHER; note = 2-prime-fluoroadenosine
  modified_base 12: mod_base = um
  modified_base 13..15: mod_base = OTHER; note = Phosphorothioate internucleotide linkage
  modified_base 13: mod_base = OTHER; note = 2-prime-fluoroadenosine
  modified_base 14: mod_base = OTHER; note = 2-prime-O-methyladenosine
  modified_base 15: mod_base = OTHER; note = 2-prime-fluoroadenosine
  source 1..15: mol_type = other RNA
agtggatgacataaa

SEQ ID NO: 289 - RNA, 15 nt, synthetic construct
  misc_feature 1..15: note = Description of Artificial Sequence: Synthetic oligonucleotide
  modified_base 1..3: mod_base = OTHER; note = Phosphorothioate internucleotide linkage
  modified_base 1: mod_base = OTHER; note = 2-prime-fluoroadenosine
  modified_base 2: mod_base = cm
  modified_base 3: mod_base = OTHER; note = 2-prime-fluoroadenosine
  modified_base 4: mod_base = um
  modified_base 5: mod_base = OTHER; note = 2-prime-fluoroadenosine
  modified_base 6: mod_base = OTHER; note = 2-prime-O-methyladenosine
  modified_base 7: mod_base = OTHER; note = 2-prime-fluorouridine
  modified_base 8: mod_base = gm
  modified_base 9: mod_base = OTHER; note = 2-prime-fluorocytidine
  modified_base 10: mod_base = um
  modified_base 11: mod_base = OTHER; note = 2-prime-fluorouridine
  modified_base 12: mod_base = um
  modified_base 13..15: mod_base = OTHER; note = Phosphorothioate internucleotide linkage
  modified_base 13: mod_base = OTHER; note = 2-prime-fluorouridine
  modified_base 13: mod_base = OTHER; note = 2-prime-fluorouridine
  modified_base 14: mod_base = OTHER; note = 2-prime-O-methyladenosine
  modified_base 15: mod_base = OTHER; note = 2-prime-fluoroadenosine
  source 1..15: mol_type = other RNA
acataatgcttttaa

SEQ ID NO: 290 - RNA, 15 nt, synthetic construct
  misc_feature 1..15: note = Description of Artificial Sequence: Synthetic oligonucleotide
  modified_base 1..3: mod_base = OTHER; note = Phosphorothioate internucleotide linkage
  modified_base 1: mod_base = OTHER; note = 2-prime-fluoroadenosine
  modified_base 2: mod_base = OTHER; note = 2-prime-O-methyladenosine
  modified_base 3: mod_base = OTHER; note = 2-prime-fluorocytidine
  modified_base 4: mod_base = gm
  modified_base 5: mod_base = OTHER; note = 2-prime-fluorocytidine
  modified_base 6: mod_base = OTHER; note = 2-prime-O-methyladenosine
  modified_base 7: mod_base = OTHER; note = 2-prime-fluorouridine
  modified_base 8: mod_base = cm
  modified_base 9: mod_base = OTHER; note = 2-prime-fluorocytidine
  modified_base 10: mod_base = OTHER; note = 2-prime-O-methyladenosine
  modified_base 11: mod_base = OTHER; note = 2-prime-fluoroadenosine
  modified_base 12: mod_base = um
  modified_base 13..15: mod_base = OTHER; note = Phosphorothioate internucleotide linkage
  modified_base 13: mod_base = OTHER; note = 2-prime-fluoroguanosine
  modified_base 14: mod_base = gm
  modified_base 15: mod_base = OTHER; note = 2-prime-fluoroadenosine
  source 1..15: mol_type = other RNA
aacgcatccaatgga

SEQ ID NO: 291 - RNA, 15 nt, synthetic construct
  misc_feature 1..15: note = Description of Artificial Sequence: Synthetic oligonucleotide
  modified_base 1..3: mod_base = OTHER; note = Phosphorothioate internucleotide linkage
  modified_base 1: mod_base = OTHER; note = 2-prime-fluoroguanosine
  modified_base 2: mod_base = OTHER; note = 2-prime-O-methyladenosine
  modified_base 3: mod_base = OTHER; note = 2-prime-fluoroadenosine
  modified_base 4: mod_base = gm
  modified_base 5: mod_base = OTHER; note = 2-prime-fluorocytidine
  modified_base 6: mod_base = OTHER; note = 2-prime-O-methyladenosine
  modified_base 7: mod_base = OTHER; note = 2-prime-fluoroguanosine
  modified_base 8: mod_base = cm
  modified_base 9: mod_base = OTHER; note = 2-prime-fluorocytidine
  modified_base 10: mod_base = um
  modified_base 11: mod_base = OTHER; note = 2-prime-fluoroguanosine
  modified_base 12: mod_base = um
  modified_base 13..15: mod_base = OTHER; note = Phosphorothioate internucleotide linkage
  modified_base 13: mod_base = OTHER; note = 2-prime-fluoroguanosine
  modified_base 14: mod_base = OTHER; note = 2-prime-O-methyladenosine
  modified_base 15: mod_base = OTHER; note = 2-prime-fluoroadenosine
  source 1..15: mol_type = other RNA
gaagcagcctgtgaa

SEQ ID NO: 292 - RNA, 15 nt, synthetic construct
  misc_feature 1..15: note = Description of Artificial Sequence: Synthetic oligonucleotide
  modified_base 1..3: mod_base = OTHER; note = Phosphorothioate internucleotide linkage
  modified_base 1: mod_base = OTHER; note = 2-prime-fluoroguanosine
  modified_base 2: mod_base = gm
  modified_base 3: mod_base = OTHER; note = 2-prime-fluorocytidine
  modified_base 4: mod_base = gm
  modified_base 5: mod_base = OTHER; note = 2-prime-fluorouridine
  modified_base 6: mod_base = um
  modified_base 7: mod_base = OTHER; note = 2-prime-fluorouridine
  modified_base 8: mod_base = cm
  modified_base 9: mod_base = OTHER; note = 2-prime-fluoroadenosine
  modified_base 10: mod_base = um
  modified_base 11: mod_base = OTHER; note = 2-prime-fluorouridine
  modified_base 12: mod_base = um
  modified_base 13..15: mod_base = OTHER; note = Phosphorothioate internucleotide linkage
  modified_base 13: mod_base = OTHER; note = 2-prime-fluoroadenosine
  modified_base 14: mod_base = gm
  modified_base 15: mod_base = OTHER; note = 2-prime-fluoroadenosine
  source 1..15: mol_type = other RNA
ggcgtttcatttaga

SEQ ID NO: 293 - RNA, 15 nt, synthetic construct
  misc_feature 1..15: note = Description of Artificial Sequence: Synthetic oligonucleotide
  modified_base 1..3: mod_base = OTHER; note = Phosphorothioate internucleotide linkage
  modified_base 1: mod_base = OTHER; note = 2-prime-fluorouridine
  modified_base 2: mod_base = um
  modified_base 3: mod_base = OTHER; note = 2-prime-fluorocytidine
  modified_base 4: mod_base = OTHER; note = 2-prime-O-methyladenosine
  modified_base 5: mod_base = OTHER; note = 2-prime-fluorouridine
  modified_base 6: mod_base = um
  modified_base 7: mod_base = OTHER; note = 2-prime-fluorouridine
  modified_base 8: mod_base = OTHER; note = 2-prime-O-methyladenosine
  modified_base 9: mod_base = OTHER; note = 2-prime-fluoroguanosine
  modified_base 10: mod_base = um
  modified_base 11: mod_base = OTHER; note = 2-prime-fluorouridine
  modified_base 12: mod_base = um
  modified_base 13..15: mod_base = OTHER; note = Phosphorothioate internucleotide linkage
  modified_base 13: mod_base = OTHER; note = 2-prime-fluoroguanosine
  modified_base 14: mod_base = um
  modified_base 15: mod_base = OTHER; note = 2-prime-fluoroadenosine
  source 1..15: mol_type = other RNA
ttcatttagtttgta

SEQ ID NO: 294 - RNA, 15 nt, synthetic construct
  misc_feature 1..15: note = Description of Artificial Sequence: Synthetic oligonucleotide
  modified_base 1..3: mod_base = OTHER; note = Phosphorothioate internucleotide linkage
  modified_base 1: mod_base = OTHER; note = 2-prime-fluoroguanosine
  modified_base 2: mod_base = um
  modified_base 3: mod_base = OTHER; note = 2-prime-fluoroguanosine
  modified_base 4: mod_base = gm
  modified_base 5: mod_base = OTHER; note = 2-prime-fluorouridine
  modified_base 6: mod_base = gm
  modified_base 7: mod_base = OTHER; note = 2-prime-fluorouridine
  modified_base 8: mod_base = OTHER; note = 2-prime-O-methyladenosine
  modified_base 9: mod_base = OTHER; note = 2-prime-fluoroguanosine
  modified_base 10: mod_base = um
  modified_base 11: mod_base = OTHER; note = 2-prime-fluoroguanosine
  modified_base 12: mod_base = um
  modified_base 13..15: mod_base = OTHER; note = Phosphorothioate internucleotide linkage
  modified_base 13: mod_base = OTHER; note = 2-prime-fluoroadenosine
  modified_base 14: mod_base = gm
  modified_base 15: mod_base = OTHER; note = 2-prime-fluoroadenosine
  source 1..15: mol_type = other RNA
gtggtgtagtgtaga

SEQ ID NO: 295 - RNA, 15 nt, synthetic construct
  misc_feature 1..15: note = Description of Artificial Sequence: Synthetic oligonucleotide
  modified_base 1..3: mod_base = OTHER; note = Phosphorothioate internucleotide linkage
  modified_base 1: mod_base = OTHER; note = 2-prime-fluoroguanosine
  modified_base 2: mod_base = um
  modified_base 3: mod_base = OTHER; note = 2-prime-fluoroguanosine
  modified_base 4: mod_base = um
  modified_base 5: mod_base = OTHER; note = 2-prime-fluoroadenosine
  modified_base 6: mod_base = gm
  modified_base 7: mod_base = OTHER; note = 2-prime-fluorouridine
  modified_base 8: mod_base = gm
  modified_base 9: mod_base = OTHER; note = 2-prime-fluorouridine
  modified_base 10: mod_base = OTHER; note = 2-prime-O-methyladenosine
  modified_base 11: mod_base = OTHER; note = 2-prime-fluoroguanosine
  modified_base 12: mod_base = um
  modified_base 13: mod_base = OTHER; note = 2-prime-fluorouridine
  modified_base 13..15: mod_base = OTHER; note = Phosphorothioate internucleotide linkage
  modified_base 14: mod_base = OTHER; note = 2-prime-O-methyladenosine
  modified_base 15: mod_base = OTHER; note = 2-prime-fluoroadenosine
  source 1..15: mol_type = other RNA
gtgtagtgtagttaa

SEQ ID NO: 296 - RNA, 15 nt, synthetic construct
  misc_feature 1..15: note = Description of Artificial Sequence: Synthetic oligonucleotide
  modified_base 1..3: mod_base = OTHER; note = Phosphorothioate internucleotide linkage
  modified_base 1: mod_base = OTHER; note = 2-prime-fluorouridine
  modified_base 2: mod_base = gm
  modified_base 3: mod_base = OTHER; note = 2-prime-fluorouridine
  modified_base 4: mod_base = OTHER; note = 2-prime-O-methyladenosine
  modified_base 5: mod_base = OTHER; note = 2-prime-fluoroguanosine
  modified_base 6: mod_base = um
  modified_base 7: mod_base = OTHER; note = 2-prime-fluoroguanosine
  modified_base 8: mod_base = um
  modified_base 9: mod_base = OTHER; note = 2-prime-fluoroadenosine
  modified_base 10: mod_base = gm
  modified_base 11: mod_base = OTHER; note = 2-prime-fluorouridine
  modified_base 12: mod_base = um
  modified_base 13..15: mod_base = OTHER; note = Phosphorothioate internucleotide linkage
  modified_base 13: mod_base = OTHER; note = 2-prime-fluoroadenosine
  modified_base 14: mod_base = OTHER; note = 2-prime-O-methyladenosine
  modified_base 15: mod_base = OTHER; note = 2-prime-fluoroadenosine
  source 1..15: mol_type = other RNA
tgtagtgtagttaaa

SEQ ID NO: 297 - RNA, 15 nt, synthetic construct
  misc_feature 1..15: note = Description of Artificial Sequence: Synthetic oligonucleotide
  modified_base 1..3: mod_base = OTHER; note = Phosphorothioate internucleotide linkage
  modified_base 1: mod_base = OTHER; note = 2-prime-fluoroguanosine
  modified_base 2: mod_base = um
  modified_base 3: mod_base = OTHER; note = 2-prime-fluoroadenosine
  modified_base 4: mod_base = gm
  modified_base 5: mod_base = OTHER; note = 2-prime-fluorouridine
  modified_base 6: mod_base = gm
  modified_base 7: mod_base = OTHER; note = 2-prime-fluorouridine
  modified_base 8: mod_base = OTHER; note = 2-prime-O-methyladenosine
  modified_base 9: mod_base = OTHER; note = 2-prime-fluoroguanosine
  modified_base 10: mod_base = um
  modified_base 11: mod_base = OTHER; note = 2-prime-fluorouridine
  modified_base 12: mod_base = OTHER; note = 2-prime-O-methyladenosine
  modified_base 13..15: mod_base = OTHER; note = Phosphorothioate internucleotide linkage
  modified_base 13: mod_base = OTHER; note = 2-prime-fluoroadenosine
  modified_base 14: mod_base = OTHER; note = 2-prime-O-methyladenosine
  modified_base 15: mod_base = OTHER; note = 2-prime-fluoroadenosine
  source 1..15: mol_type = other RNA
gtagtgtagttaaaa

SEQ ID NO: 298 - RNA, 15 nt, synthetic construct
  misc_feature 1..15: note = Description of Artificial Sequence: Synthetic oligonucleotide
  modified_base 1..3: mod_base = OTHER; note = Phosphorothioate internucleotide linkage
  modified_base 1: mod_base = OTHER; note = 2-prime-fluoroadenosine
  modified_base 2: mod_base = gm
  modified_base 3: mod_base = OTHER; note = 2-prime-fluorouridine
  modified_base 4: mod_base = um
  modified_base 5: mod_base = OTHER; note = 2-prime-fluoroadenosine
  modified_base 6: mod_base = OTHER; note = 2-prime-O-methyladenosine
  modified_base 7: mod_base = OTHER; note = 2-prime-fluoroadenosine
  modified_base 8: mod_base = cm
  modified_base 9: mod_base = OTHER; note = 2-prime-fluorocytidine
  modified_base 10: mod_base = OTHER; note = 2-prime-O-methyladenosine
  modified_base 11: mod_base = OTHER; note = 2-prime-fluoroguanosine
  modified_base 12: mod_base = gm
  modified_base 13..15: mod_base = OTHER; note = Phosphorothioate internucleotide linkage
  modified_base 13: mod_base = OTHER; note = 2-prime-fluorouridine
  modified_base 14: mod_base = um
  modified_base 15: mod_base = OTHER; note = 2-prime-fluoroadenosine
  source 1..15: mol_type = other RNA
agttaaaccaggtta

SEQ ID NO: 299 - RNA, 15 nt, synthetic construct
  misc_feature 1..15: note = Description of Artificial Sequence: Synthetic oligonucleotide
  modified_base 1..3: mod_base = OTHER; note = Phosphorothioate internucleotide linkage
  modified_base 1: mod_base = OTHER; note = 2-prime-O-methyladenosine
  modified_base 1: mod_base = OTHER; note = 2-prime-fluorouridine
  modified_base 3: mod_base = OTHER; note = 2-prime-fluoroadenosine
  modified_base 4: mod_base = OTHER; note = 2-prime-O-methyladenosine
  modified_base 5: mod_base = OTHER; note = 2-prime-fluorocytidine
  modified_base 6: mod_base = cm
  modified_base 7: mod_base = OTHER; note = 2-prime-fluoroadenosine
  modified_base 8: mod_base = cm
  modified_base 9: mod_base = OTHER; note = 2-prime-fluoroguanosine
  modified_base 10: mod_base = um
  modified_base 11: mod_base = OTHER; note = 2-prime-fluorouridine
  modified_base 12: mod_base = um
  modified_base 13..15: mod_base = OTHER; note = Phosphorothioate internucleotide linkage
  modified_base 13: mod_base = OTHER; note = 2-prime-fluorouridine
  modified_base 14: mod_base = OTHER; note = 2-prime-O-methyladenosine
  modified_base 15: mod_base = OTHER; note = 2-prime-fluoroadenosine
  source 1..15: mol_type = other RNA
taaaccaggttttaa

SEQ ID NO: 300 - RNA, 15 nt, synthetic construct
  misc_feature 1..15: note = Description of Artificial Sequence: Synthetic oligonucleotide
  modified_base 1..3: mod_base = OTHER; note = Phosphorothioate internucleotide linkage
  modified_base 1: mod_base = OTHER; note = 2-prime-fluoroadenosine
  modified_base 2: mod_base = OTHER; note = 2-prime-O-methyladenosine
  modified_base 3: mod_base = OTHER; note = 2-prime-fluoroadenosine
  modified_base 4: mod_base = cm
  modified_base 5: mod_base = OTHER; note = 2-prime-fluorocytidine
  modified_base 6: mod_base = OTHER; note = 2-prime-O-methyladenosine
  modified_base 7: mod_base = OTHER; note = 2-prime-fluoroguanosine
  modified_base 8: mod_base = gm
  modified_base 9: mod_base = OTHER; note = 2-prime-fluorouridine
  modified_base 10: mod_base = um
  modified_base 11: mod_base = OTHER; note = 2-prime-fluorouridine
  modified_base 12: mod_base = um
  modified_base 13..15: mod_base = OTHER; note = Phosphorothioate internucleotide linkage
  modified_base 13: mod_base = OTHER; note = 2-prime-fluoroadenosine
  modified_base 14: mod_base = OTHER; note = 2-prime-O-methyladenosine
  modified_base 15: mod_base = OTHER; note = 2-prime-fluoroadenosine
  source 1..15: mol_type = other RNA
aaaccaggttttaaa

SEQ ID NO: 301 - RNA, 15 nt, synthetic construct
  misc_feature 1..15: note = Description of Artificial Sequence: Synthetic oligonucleotide
  modified_base 1..3: mod_base = OTHER; note = Phosphorothioate internucleotide linkage
  modified_base 1: mod_base = OTHER; note = 2-prime-fluorouridine
  modified_base 2: mod_base = OTHER; note = 2-prime-O-methyladenosine
  modified_base 3: mod_base = OTHER; note = 2-prime-fluoroguanosine
  modified_base 4: mod_base = cm
  modified_base 5: mod_base = OTHER; note = 2-prime-fluorocytidine
  modified_base 6: mod_base = OTHER; note = 2-prime-O-methyladenosine
  modified_base 7: mod_base = OTHER; note = 2-prime-fluoroguanosine
  modified_base 8: mod_base = OTHER; note = 2-prime-O-methyladenosine
  modified_base 9: mod_base = OTHER; note = 2-prime-fluoroguanosine
  modified_base 10: mod_base = OTHER; note = 2-prime-O-methyladenosine
  modified_base 11: mod_base = OTHER; note = 2-prime-fluoroguanosine
  modified_base 12: mod_base = gm
  modified_base 13..15: mod_base = OTHER; note = Phosphorothioate internucleotide linkage
  modified_base 13: mod_base = OTHER; note = 2-prime-O-methyladenosine
  modified_base 14: mod_base = gm
  modified_base 15: mod_base = OTHER; note = 2-prime-fluoroadenosine
  source 1..15: mol_type = other RNA
tagccagagaggtga

SEQ ID NO: 302 - RNA, 15 nt, synthetic construct
  misc_feature 1..15: note = Description of Artificial Sequence: Synthetic oligonucleotide
  modified_base 1..3: mod_base = OTHER; note = Phosphorothioate internucleotide linkage
  modified_base 1: mod_base = gm
  modified_base 1: mod_base = OTHER; note = 2-prime-fluoroguanosine
  modified_base 2: mod_base = gm
  modified_base 3: mod_base = OTHER; note = 2-prime-fluorocytidine
  modified_base 5: mod_base = OTHER; note = 2-prime-fluoroguanosine
  modified_base 6: mod_base = um
  modified_base 7: mod_base = OTHER; note = 2-prime-fluorouridine
  modified_base 8: mod_base = gm
  modified_base 9: mod_base = OTHER; note = 2-prime-fluoroguanosine
  modified_base 10: mod_base = OTHER; note = 2-prime-O-methyladenosine
  modified_base 11: mod_base = OTHER; note = 2-prime-fluorouridine
  modified_base 12: mod_base = gm
  modified_base 13..15: mod_base = OTHER; note = Phosphorothioate internucleotide linkage
  modified_base 13: mod_base = OTHER; note = 2-prime-fluoroadenosine
  modified_base 14: mod_base = gm
  modified_base 15: mod_base = OTHER; note = 2-prime-fluoroadenosine
  source 1..15: mol_type = other RNA
ggcagttggatgaga

SEQ ID NO: 303 - RNA, 15 nt, synthetic construct
  misc_feature 1..15: note = Description of Artificial Sequence: Synthetic oligonucleotide
  modified_base 1..3: mod_base = OTHER; note = Phosphorothioate internucleotide linkage
  modified_base 1: mod_base = OTHER; note = 2-prime-fluorouridine
  modified_base 2: mod_base = OTHER; note = 2-prime-O-methyladenosine
  modified_base 3: mod_base = OTHER; note = 2-prime-fluorouridine
  modified_base 4: mod_base = um
  modified_base 5: mod_base = OTHER; note = 2-prime-fluorouridine
  modified_base 6: mod_base = gm
  modified_base 7: mod_base = OTHER; note = 2-prime-fluorouridine
  modified_base 8: mod_base = cm
  modified_base 9: mod_base = OTHER; note = 2-prime-fluoroadenosine
  modified_base 10: mod_base = OTHER; note = 2-prime-O-methyladenosine
  modified_base 11: mod_base = OTHER; note = 2-prime-fluoroguanosine
  modified_base 12: mod_base = um
  modified_base 13..15: mod_base = OTHER; note = Phosphorothioate internucleotide linkage
  modified_base 13: mod_base = OTHER; note = 2-prime-fluoroadenosine
  modified_base 14: mod_base = cm
  modified_base 15: mod_base = OTHER; note = 2-prime-fluoroadenosine
  source 1..15: mol_type = other RNA
tatttgtcaagtaca

SEQ ID NO: 304 - RNA, 20 nt, synthetic construct
  misc_feature 1..20: note = Description of Artificial Sequence: Synthetic oligonucleotide
  modified_base 1..3: mod_base = OTHER; note = Phosphorothioate internucleotide linkage
  modified_base 1: mod_base = um
  modified_base 2: mod_base = OTHER; note = 2-prime-fluorocytidine
  modified_base 3: mod_base = OTHER; note = 2-prime-O-methyladenosine
  modified_base 4: mod_base = OTHER; note = 2-prime-fluoroguanosine
  modified_base 5: mod_base = cm
  modified_base 6: mod_base = OTHER; note = 2-prime-fluorouridine
  modified_base 7: mod_base = um
  modified_base 8: mod_base = OTHER; note = 2-prime-fluorouridine
  modified_base 9: mod_base = um
  modified_base 10: mod_base = OTHER; note = 2-prime-fluorocytidine
  modified_base 11: mod_base = cm
  modified_base 12: mod_base = OTHER; note = 2-prime-fluoroadenosine
  modified_base 13..20: mod_base = OTHER; note = Phosphorothioate internucleotide linkage
  modified_base 13: mod_base = gm
  modified_base 14: mod_base = OTHER; note = 2-prime-fluoroguanosine
  modified_base 15: mod_base = gm
  modified_base 16: mod_base = OTHER; note = 2-prime-fluorouridine
  modified_base 17: mod_base = cm
  modified_base 18: mod_base = OTHER; note = 2-prime-fluoroguanosine
  modified_base 19: mod_base = cm
  modified_base 20: mod_base = OTHER; note = 2-prime-fluorocytidine
  source 1..20: mol_type = other RNA
tcagcttttccagggtcgcc

SEQ ID NO: 305 - RNA, 20 nt, synthetic construct
  misc_feature 1..20: note = Description of Artificial Sequence: Synthetic oligonucleotide
  modified_base 1..3: mod_base = OTHER; note = Phosphorothioate internucleotide linkage
  modified_base 1: mod_base = um
  modified_base 2: mod_base = OTHER; note = 2-prime-fluoroadenosine
  modified_base 3: mod_base = um
  modified_base 4: mod_base = OTHER; note = 2-prime-fluorocytidine
  modified_base 5: mod_base = OTHER; note = 2-prime-O-methyladenosine
  modified_base 6: mod_base = OTHER; note = 2-prime-fluoroguanosine
  modified_base 7: mod_base = cm
  modified_base 8: mod_base = OTHER; note = 2-prime-fluorouridine
  modified_base 9: mod_base = um
  modified_base 10: mod_base = OTHER; note = 2-prime-fluorouridine
  modified_base 11: mod_base = um
  modified_base 12: mod_base = OTHER; note = 2-prime-fluorocytidine
  modified_base 13..20: mod_base = OTHER; note = Phosphorothioate internucleotide linkage
  modified_base 13: mod_base = cm
  modified_base 14: mod_base = OTHER; note = 2-prime-fluoroadenosine
  modified_base 15: mod_base = gm
  modified_base 16: mod_base = OTHER; note = 2-prime-fluoroguanosine
  modified_base 17: mod_base = gm
  modified_base 18: mod_base = OTHER; note = 2-prime-fluorouridine
  modified_base 19: mod_base = cm
  modified_base 20: mod_base = OTHER; note = 2-prime-fluoroguanosine
  source 1..20: mol_type = other RNA
tatcagcttttccagggtcg

SEQ ID NO: 306 - RNA, 20 nt, synthetic construct
  misc_feature 1..20: note = Description of Artificial Sequence: Synthetic oligonucleotide
  modified_base 1..3: mod_base = OTHER; note = Phosphorothioate internucleotide linkage
  modified_base 1: mod_base = um
  modified_base 2: mod_base = OTHER; note = 2-prime-fluorouridine
  modified_base 3: mod_base = um
  modified_base 4: mod_base = OTHER; note = 2-prime-fluorocytidine
  modified_base 5: mod_base = OTHER; note = 2-prime-O-methyladenosine
  modified_base 6: mod_base = OTHER; note = 2-prime-fluorouridine
  modified_base 7: mod_base = cm
  modified_base 8: mod_base = OTHER; note = 2-prime-fluoroadenosine
  modified_base 9: mod_base = gm
  modified_base 10: mod_base = OTHER; note = 2-prime-fluorocytidine
  modified_base 11: mod_base = um
  modified_base 12: mod_base = OTHER; note = 2-prime-fluorouridine
  modified_base 13..20: mod_base = OTHER; note = Phosphorothioate internucleotide linkage
  modified_base 13: mod_base = um
  modified_base 14: mod_base = OTHER; note = 2-prime-fluorouridine
  modified_base 15: mod_base = cm
  modified_base 16: mod_base = OTHER; note = 2-prime-fluorocytidine
  modified_base 17: mod_base = OTHER; note = 2-prime-O-methyladenosine
  modified_base 18: mod_base = OTHER; note = 2-prime-fluoroguanosine
  modified_base 19: mod_base = gm
  modified_base 20: mod_base = OTHER; note = 2-prime-fluoroguanosine
  source 1..20: mol_type = other RNA
tttcatcagcttttccaggg

SEQ ID NO: 307 - RNA, 20 nt, synthetic construct
  misc_feature 1..20: note = Description of Artificial Sequence: Synthetic oligonucleotide
  modified_base 1..3: mod_base = OTHER; note = Phosphorothioate internucleotide linkage
  modified_base 1: mod_base = um
  modified_base 2: mod_base = OTHER; note = 2-prime-fluorocytidine
  modified_base 3: mod_base = cm
  modified_base 4: mod_base = OTHER; note = 2-prime-fluorouridine
  modified_base 5: mod_base = um
  modified_base 6: mod_base = OTHER; note = 2-prime-fluorocytidine
  modified_base 7: mod_base = OTHER; note = 2-prime-O-methyladenosine
  modified_base 8: mod_base = OTHER; note = 2-prime-fluorouridine
  modified_base 9: mod_base = cm
  modified_base 10: mod_base = OTHER; note = 2-prime-fluoroadenosine
  modified_base 11: mod_base = gm
  modified_base 12: mod_base = OTHER; note = 2-prime-fluorocytidine
  modified_base 13..20: mod_base = OTHER; note = Phosphorothioate internucleotide linkage
  modified_base 13: mod_base = um
  modified_base 14: mod_base = OTHER; note = 2-prime-fluorouridine
  modified_base 15: mod_base = um
  modified_base 16: mod_base = OTHER; note = 2-prime-fluorouridine
  modified_base 17: mod_base = cm
  modified_base 18: mod_base = OTHER; note = 2-prime-fluorocytidine
  modified_base 19: mod_base = OTHER; note = 2-prime-O-methyladenosine
  modified_base 20: mod_base = OTHER; note = 2-prime-fluoroguanosine
  source 1..20: mol_type = other RNA
tccttcatcagcttttccag

SEQ ID NO: 308 - RNA, 20 nt, synthetic construct
  misc_feature 1..20: note = Description of Artificial Sequence: Synthetic oligonucleotide
  modified_base 1..3: mod_base = OTHER; note = Phosphorothioate internucleotide linkage
  modified_base 1: mod_base = um
  modified_base 2: mod_base = OTHER; note = 2-prime-fluorocytidine
  modified_base 3: mod_base = gm
  modified_base 4: mod_base = OTHER; note = 2-prime-fluorocytidine
  modified_base 5: mod_base = cm
  modified_base 6: mod_base = OTHER; note = 2-prime-O-methyladenosine
  modified_base 7: mod_base = um
  modified_base 8: mod_base = OTHER; note = 2-prime-fluorocytidine
  modified_base 9: mod_base = OTHER; note = 2-prime-O-methyladenosine
  modified_base 10: mod_base = OTHER; note = 2-prime-O-methyladenosine
  modified_base 11: mod_base = cm
  modified_base 12: mod_base = OTHER; note = 2-prime-fluoroadenosine
  modified_base 13..20: mod_base = OTHER; note = Phosphorothioate internucleotide linkage
  modified_base 13: mod_base = gm
  modified_base 14: mod_base = OTHER; note = 2-prime-fluorocytidine
  modified_base 15: mod_base = um
  modified_base 16: mod_base = OTHER; note = 2-prime-O-methyladenosine
  modified_base 17: mod_base = um
  modified_base 18: mod_base = OTHER; note = 2-prime-O-methyladenosine
  modified_base 19: mod_base = cm
  modified_base 20: mod_base = OTHER; note = 2-prime-fluorocytidine
  source 1..20: mol_type = other RNA
tggccttcatcagcttttcc

SEQ ID NO: 309 - RNA, 20 nt, synthetic construct
  misc_feature 1..20: note = Description of Artificial Sequence: Synthetic oligonucleotide
  modified_base 1..3: mod_base = OTHER; note = Phosphorothioate internucleotide linkage
  modified_base 1: mod_base = um
  modified_base 2: mod_base = OTHER; note = 2-prime-fluorocytidine
  modified_base 3: mod_base = um
  modified_base 4: mod_base = OTHER; note = 2-prime-fluorocytidine
  modified_base 5: mod_base = gm
  modified_base 6: mod_base = OTHER; note = 2-prime-fluoroadenosine
  modified_base 7: mod_base = OTHER; note = 2-prime-O-methyladenosine
  modified_base 8: mod_base = OTHER; note = 2-prime-fluoroguanosine
  modified_base 9: mod_base = gm
  modified_base 10: mod_base = OTHER; note = 2-prime-fluorocytidine
  modified_base 11: mod_base = cm
  modified_base 12: mod_base = OTHER; note = 2-prime-fluorouridine
  modified_base 13..20: mod_base = OTHER; note = Phosphorothioate internucleotide linkage
  modified_base 13: mod_base = um
  modified_base 14: mod_base = OTHER; note = 2-prime-fluorocytidine
  modified_base 15: mod_base = OTHER; note = 2-prime-O-methyladenosine
  modified_base 16: mod_base = OTHER; note = 2-prime-fluorouridine
  modified_base 17: mod_base = cm
  modified_base 18: mod_base = OTHER; note = 2-prime-fluoroadenosine
  modified_base 19: mod_base = gm
  modified_base 20: mod_base = OTHER; note = 2-prime-fluorocytidine
  source 1..20: mol_type = other RNA
tctcgaaggccttcatcagc

SEQ ID NO: 310 - RNA, 20 nt, synthetic construct
  misc_feature 1..20: note = Description of Artificial Sequence: Synthetic oligonucleotide
  modified_base 1..3: mod_base = OTHER; note = Phosphorothioate internucleotide linkage
  modified_base 1: mod_base = um
  modified_base 2: mod_base = OTHER; note = 2-prime-fluoroguanosine
  modified_base 3: mod_base = OTHER; note = 2-prime-O-methyladenosine
  modified_base 4: mod_base = OTHER; note = 2-prime-fluorocytidine
  modified_base 5: mod_base = um
  modified_base 6: mod_base = OTHER; note = 2-prime-fluorocytidine
  modified_base 7: mod_base = gm
  modified_base 8: mod_base = OTHER; note = 2-prime-fluoroadenosine
  modified_base 9: mod_base = OTHER; note = 2-prime-O-methyladenosine
  modified_base 10: mod_base = OTHER; note = 2-prime-fluoroguanosine
  modified_base 11: mod_base = gm
  modified_base 12: mod_base = OTHER; note = 2-prime-fluorocytidine
  modified_base 13..20: mod_base = OTHER; note = Phosphorothioate internucleotide linkage
  modified_base 13: mod_base = cm
  modified_base 14: mod_base = OTHER; note = 2-prime-fluorouridine
  modified_base 15: mod_base = um
  modified_base 16: mod_base = OTHER; note = 2-prime-fluorocytidine
  modified_base 17: mod_base = OTHER; note = 2-prime-O-methyladenosine
  modified_base 18: mod_base = OTHER; note = 2-prime-fluorouridine
  modified_base 19: mod_base = cm
  modified_base 20: mod_base = OTHER; note = 2-prime-fluoroadenosine
  source 1..20: mol_type = other RNA
tgactcgaaggccttcatca

SEQ ID NO: 311 - RNA, 20 nt, synthetic construct
  misc_feature 1..20: note = Description of Artificial Sequence: Synthetic oligonucleotide
  modified_base 1..3: mod_base = OTHER; note = Phosphorothioate internucleotide linkage
  modified_base 1: mod_base = um
  modified_base 2: mod_base = OTHER; note = 2-prime-fluorouridine
  modified_base 3: mod_base = um
  modified_base 4: mod_base = OTHER; note = 2-prime-fluoroguanosine
  modified_base 5: mod_base = OTHER; note = 2-prime-O-methyladenosine
  modified_base 6: mod_base = OTHER; note = 2-prime-fluoroguanosine
  modified_base 7: mod_base = gm
  modified_base 8: mod_base = OTHER; note = 2-prime-fluoroguanosine
  modified_base 9: mod_base = OTHER; note = 2-prime-O-methyladenosine
  modified_base 10: mod_base = OTHER; note = 2-prime-fluorocytidine
  modified_base 11: mod_base = um
  modified_base 12: mod_base = OTHER; note = 2-prime-fluorocytidine
  modified_base 13..20: mod_base = OTHER; note = Phosphorothioate internucleotide linkage
  modified_base 13: mod_base = gm
  modified_base 14: mod_base = OTHER; note = 2-prime-fluoroadenosine
  modified_base 15: mod_base = OTHER; note = 2-prime-O-methyladenosine
  modified_base 16: mod_base = OTHER; note = 2-prime-fluoroguanosine
  modified_base 17: mod_base = gm
  modified_base 18: mod_base = OTHER; note = 2-prime-fluorocytidine
  modified_base 19: mod_base = cm
  modified_base 20: mod_base = OTHER; note = 2-prime-fluorouridine
  source 1..20: mol_type = other RNA
tttgagggactcgaaggcct

SEQ ID NO: 312 - RNA, 20 nt, synthetic construct
  misc_feature 1..20: note = Description of Artificial Sequence: Synthetic oligonucleotide
  modified_base 1..3: mod_base = OTHER; note = Phosphorothioate internucleotide linkage
  modified_base 1: mod_base = um
  modified_base 2: mod_base = OTHER; note = 2-prime-fluorouridine
  modified_base 3: mod_base = cm
  modified_base 4: mod_base = OTHER; note = 2-prime-fluorouridine
  modified_base 5: mod_base = um
  modified_base 6: mod_base = OTHER; note = 2-prime-fluoroguanosine
  modified_base 7: mod_base = OTHER; note = 2-prime-O-methyladenosine
  modified_base 8: mod_base = OTHER; note = 2-prime-fluoroguanosine
  modified_base 9: mod_base = gm
  modified_base 10: mod_base = OTHER; note = 2-prime-fluoroguanosine
  modified_base 11: mod_base = OTHER; note = 2-prime-O-methyladenosine
  modified_base 12: mod_base = OTHER; note = 2-prime-fluorocytidine
  modified_base 13..20: mod_base = OTHER; note = Phosphorothioate internucleotide linkage
  modified_base 13: mod_base = um
  modified_base 14: mod_base = OTHER; note = 2-prime-fluorocytidine
  modified_base 15: mod_base = gm
  modified_base 16: mod_base = OTHER; note = 2-prime-fluorouridine
  modified_base 17: mod_base = OTHER; note = 2-prime-O-methyladenosine
  modified_base 18: mod_base = OTHER; note = 2-prime-fluoroguanosine
  modified_base 19: mod_base = gm
  modified_base 20: mod_base = OTHER; note = 2-prime-fluorocytidine
  source 1..20: mol_type = other RNA
tacttgagggactcgaaggc

SEQ ID NO: 313 - RNA, 20 nt, synthetic construct
  misc_feature 1..20: note = Description of Artificial Sequence: Synthetic oligonucleotide
  modified_base 1..3: mod_base = OTHER; note = Phosphorothioate internucleotide linkage
  modified_base 1: mod_base = um
  modified_base 2: mod_base = OTHER; note = 2-prime-fluoroguanosine
  modified_base 3: mod_base = gm
  modified_base 4: mod_base = OTHER; note = 2-prime-fluoroadenosine
  modified_base 5: mod_base = cm
  modified_base 6: mod_base = OTHER; note = 2-prime-fluorouridine
  modified_base 7: mod_base = um
  modified_base 8: mod_base = OTHER; note = 2-prime-fluoroguanosine
  modified_base 9: mod_base = OTHER; note = 2-prime-O-methyladenosine
  modified_base 10: mod_base = OTHER; note = 2-prime-fluoroguanosine
  modified_base 11: mod_base = gm
  modified_base 12: mod_base = OTHER; note = 2-prime-fluoroguanosine
  modified_base 13..20: mod_base = OTHER; note = Phosphorothioate internucleotide linkage
  modified_base 13: mod_base = OTHER; note = 2-prime-O-methyladenosine
  modified_base 14: mod_base = OTHER; note = 2-prime-fluorocytidine
  modified_base 15: mod_base = um
  modified_base 16: mod_base = OTHER; note = 2-prime-fluorocytidine
  modified_base 17: mod_base = gm
  modified_base 18: mod_base = OTHER; note = 2-prime-fluoroadenosine
  modified_base 19: mod_base = OTHER; note = 2-prime-O-methyladenosine
  modified_base 20: mod_base = OTHER; note = 2-prime-fluoroguanosine
  source 1..20: mol_type = other RNA
tggacttgagggactcgaag

SEQ ID NO: 314 - RNA, 20 nt, synthetic construct
  misc_feature 1..20: note = Description of Artificial Sequence: Synthetic oligonucleotide
  modified_base 1..3: mod_base = OTHER; note = Phosphorothioate internucleotide linkage
  modified_base 1: mod_base = um
  modified_base 2: mod_base = OTHER; note = 2-prime-fluoroadenosine
  modified_base 3: mod_base = OTHER; note = 2-prime-O-methyladenosine
  modified_base 4: mod_base = OTHER; note = 2-prime-fluoroguanosine
  modified_base 5: mod_base = gm
  modified_base 6: mod_base = OTHER; note = 2-prime-fluoroadenosine
  modified_base 7: mod_base = cm
  modified_base 8: mod_base = OTHER; note = 2-prime-fluorouridine
  modified_base 9: mod_base = um
  modified_base 10: mod_base = OTHER; note = 2-prime-fluoroguanosine
  modified_base 11: mod_base = OTHER; note = 2-prime-O-methyladenosine
  modified_base 12: mod_base = OTHER; note = 2-prime-fluoroguanosine
  modified_base 13..20: mod_base = OTHER; note = Phosphorothioate internucleotide linkage
  modified_base 13: mod_base = gm
  modified_base 14: mod_base = OTHER; note = 2-prime-fluoroguanosine
  modified_base 15: mod_base = OTHER; note = 2-prime-O-methyladenosine
  modified_base 16: mod_base = OTHER; note = 2-prime-fluorocytidine
  modified_base 17: mod_base = um
  modified_base 18: mod_base = OTHER; note = 2-prime-fluorocytidine
  modified_base 19: mod_base = gm
  modified_base 20: mod_base = OTHER; note = 2-prime-fluoroadenosine
  source 1..20: mol_type = other RNA
taaggacttgagggactcga

SEQ ID NO: 315 - RNA, 20 nt, synthetic construct
  misc_feature 1..20: note = Description of Artificial Sequence: Synthetic oligonucleotide
  modified_base 1..3: mod_base = OTHER; note = Phosphorothioate internucleotide linkage
  modified_base 1: mod_base = um
  modified_base 2: mod_base = OTHER; note = 2-prime-fluoroguanosine
  modified_base 3: mod_base = gm
  modified_base 4: mod_base = OTHER; note = 2-prime-fluoroadenosine
  modified_base 5: mod_base = OTHER; note = 2-prime-O-methyladenosine
  modified_base 6: mod_base = OTHER; note = 2-prime-fluoroguanosine
  modified_base 7: mod_base = gm
  modified_base 8: mod_base = OTHER; note = 2-prime-fluoroadenosine
  modified_base 9: mod_base = cm
  modified_base 10: mod_base = OTHER; note = 2-prime-fluorouridine
  modified_base 11: mod_base = um
  modified_base 12: mod_base = OTHER; note = 2-prime-fluoroguanosine
  modified_base 13..20: mod_base = OTHER; note = Phosphorothioate internucleotide linkage
  modified_base 13: mod_base = OTHER; note = 2-prime-O-methyladenosine
  modified_base 14: mod_base = OTHER; note = 2-prime-fluoroguanosine
  modified_base 15: mod_base = gm
  modified_base 16: mod_base = OTHER; note = 2-prime-fluoroguanosine
  modified_base 17: mod_base = OTHER; note = 2-prime-O-methyladenosine
  modified_base 18: mod_base = OTHER; note = 2-prime-fluorocytidine
  modified_base 19: mod_base = um
  modified_base 20: mod_base = OTHER; note = 2-prime-fluorocytidine
  source 1..20: mol_type = other RNA
tggaaggacttgagggactc

SEQ ID NO: 316 - RNA, 20 nt, synthetic construct
  misc_feature 1..20: note = Description of Artificial Sequence: Synthetic oligonucleotide
  modified_base 1..3: mod_base = OTHER; note = Phosphorothioate internucleotide linkage
  modified_base 1: mod_base = um
  modified_base 2: mod_base = OTHER; note = 2-prime-fluoroguanosine
  modified_base 3: mod_base = cm
  modified_base 4: mod_base = OTHER; note = 2-prime-fluorouridine
  modified_base 5: mod_base = gm
  modified_base 6: mod_base = OTHER; note = 2-prime-fluoroguanosine
  modified_base 7: mod_base = OTHER; note = 2-prime-O-methyladenosine
  modified_base 8: mod_base = OTHER; note = 2-prime-fluoroadenosine
  modified_base 9: mod_base = gm
  modified_base 10: mod_base = OTHER; note = 2-prime-fluoroguanosine
  modified_base 11: mod_base = OTHER; note = 2-prime-O-methyladenosine
  modified_base 12: mod_base = OTHER; note = 2-prime-fluorocytidine
  modified_base 13..20: mod_base = OTHER; note = Phosphorothioate internucleotide linkage
  modified_base 13: mod_base = um
  modified_base 14: mod_base = OTHER; note = 2-prime-fluorouridine
  modified_base 15: mod_base = gm
  modified_base 16: mod_base = OTHER; note = 2-prime-fluoroadenosine
  modified_base 17: mod_base = gm
  modified_base 18: mod_base = OTHER; note = 2-prime-fluoroguanosine
  modified_base 19: mod_base = gm
  modified_base 20: mod_base = OTHER; note = 2-prime-fluoroadenosine
  source 1..20: mol_type = other RNA
tgctggaaggacttgaggga

SEQ ID NO: 317 - RNA, 20 nt, synthetic construct
  misc_feature 1..20: note = Description of Artificial Sequence: Synthetic oligonucleotide
  modified_base 1..3: mod_base = OTHER; note = Phosphorothioate internucleotide linkage
  modified_base 1: mod_base = um
  modified_base 2: mod_base = OTHER; note = 2-prime-fluoroguanosine
  modified_base 3: mod_base = gm
  modified_base 4: mod_base = OTHER; note = 2-prime-fluorocytidine
  modified_base 5: mod_base = gm
  modified_base 6: mod_base = OTHER; note = 2-prime-fluoroguanosine
  modified_base 7: mod_base = cm
  modified_base 8: mod_base = OTHER; note = 2-prime-fluorouridine
  modified_base 9: mod_base = gm
  modified_base 10: mod_base = OTHER; note = 2-prime-fluorouridine
  modified_base 11: mod_base = um
  modified_base 12: mod_base = OTHER; note = 2-prime-fluoroguanosine
  modified_base 13..20: mod_base = OTHER; note = Phosphorothioate internucleotide linkage
  modified_base 13: mod_base = cm
  modified_base 14: mod_base = OTHER; note = 2-prime-fluorouridine
  modified_base 15: mod_base = gm
  modified_base 16: mod_base = OTHER; note = 2-prime-fluorocytidine
  modified_base 17: mod_base = um
  modified_base 18: mod_base = OTHER; note = 2-prime-fluoroguanosine
  modified_base 19: mod_base = cm
  modified_base 20: mod_base = OTHER; note = 2-prime-fluorouridine
  source 1..20: mol_type = other RNA
tggcggctgttgctgctgct

SEQ ID NO: 318 - RNA, 20 nt, synthetic construct
  misc_feature 1..20: note = Description of Artificial Sequence: Synthetic oligonucleotide
  modified_base 1..3: mod_base = OTHER; note = Phosphorothioate internucleotide linkage
  modified_base 1: mod_base = um
  modified_base 2: mod_base = OTHER; note = 2-prime-fluoroguanosine
  modified_base 3: mod_base = gm
  modified_base 4: mod_base = OTHER; note = 2-prime-fluorouridine
  modified_base 5: mod_base = gm
  modified_base 6: mod_base = OTHER; note = 2-prime-fluoroguanosine
  modified_base 7: mod_base = cm
  modified_base 8: mod_base = OTHER; note = 2-prime-fluoroguanosine
  modified_base 9: mod_base = gm
  modified_base 10: mod_base = OTHER; note = 2-prime-fluorocytidine
  modified_base 11: mod_base = um
  modified_base 12: mod_base = OTHER; note = 2-prime-fluoroguanosine
  modified_base 13..20: mod_base = OTHER; note = Phosphorothioate internucleotide linkage
  modified_base 13: mod_base = um
  modified_base 14: mod_base = OTHER; note = 2-prime-fluorouridine
  modified_base 15: mod_base = gm
  modified_base 16: mod_base = OTHER; note = 2-prime-fluorocytidine
  modified_base 17: mod_base = um
  modified_base 18: mod_base = OTHER; note = 2-prime-fluoroguanosine
  modified_base 19: mod_base = cm
  modified_base 20: mod_base = OTHER; note = 2-prime-fluorouridine
  source 1..20: mol_type = other RNA
tggtggcggctgttgctgct

SEQ ID NO: 319 - RNA, 20 nt, synthetic construct
  misc_feature 1..20: note = Description of Artificial Sequence: Synthetic oligonucleotide
  modified_base 1..3: mod_base = OTHER; note = Phosphorothioate internucleotide linkage
  modified_base 1: mod_base = um
  modified_base 2: mod_base = OTHER; note = 2-prime-fluorouridine
  modified_base 3: mod_base = gm
  modified_base 4: mod_base = OTHER; note = 2-prime-fluoroadenosine
  modified_base 5: mod_base = gm
  modified_base 6: mod_base = OTHER; note = 2-prime-fluoroguanosine
  modified_base 7: mod_base = OTHER; note = 2-prime-O-methyladenosine
  modified_base 9: mod_base = gm
  modified_base 10: mod_base = OTHER; note = 2-prime-fluorocytidine
  modified_base 11: mod_base = um
  modified_base 12: mod_base = OTHER; note = 2-prime-fluoroguanosine
  modified_base 13..20: mod_base = OTHER; note = Phosphorothioate internucleotide linkage
  modified_base 13: mod_base = OTHER; note = 2-prime-O-methyladenosine
  modified_base 14: mod_base = OTHER; note = 2-prime-fluoroguanosine
  modified_base 15: mod_base = gm
  modified_base 16: mod_base = OTHER; note = 2-prime-fluoroadenosine
  modified_base 17: mod_base = gm
  modified_base 18: mod_base = OTHER; note = 2-prime-fluoroadenosine
  modified_base 18: mod_base = OTHER; note = 2-prime-fluoroguanosine
  modified_base 19: mod_base = cm
  modified_base 20: mod_base = OTHER; note = 2-prime-fluoroguanosine
  source 1..20: mol_type = other RNA
ttgaggaagctgaggaggcg

SEQ ID NO: 320 - RNA, 20 nt, synthetic construct
  misc_feature 1..20: note = Description of Artificial Sequence: Synthetic oligonucleotide
  modified_base 1..3: mod_base = OTHER; note = Phosphorothioate internucleotide linkage
  modified_base 1: mod_base = um
  modified_base 2: mod_base = OTHER; note = 2-prime-fluoroguanosine
  modified_base 3: mod_base = cm
  modified_base 4: mod_base = OTHER; note = 2-prime-fluorouridine
  modified_base 5: mod_base = gm
  modified_base 6: mod_base = OTHER; note = 2-prime-fluoroadenosine
  modified_base 7: mod_base = gm
  modified_base 8: mod_base = OTHER; note = 2-prime-fluoroguanosine
  modified_base 9: mod_base = OTHER; note = 2-prime-O-methyladenosine
  modified_base 10: mod_base = OTHER; note = 2-prime-fluoroadenosine
  modified_base 11: mod_base = gm
  modified_base 12: mod_base = OTHER; note = 2-prime-fluorocytidine
  modified_base 13: mod_base = um
  modified_base 13..20: mod_base = OTHER; note = Phosphorothioate internucleotide linkage
  modified_base 14: mod_base = OTHER; note = 2-prime-fluoroguanosine
  modified_base 15: mod_base = OTHER; note = 2-prime-O-methyladenosine
  modified_base 16: mod_base = OTHER; note = 2-prime-fluoroguanosine
  modified_base 17: mod_base = gm
  modified_base 18: mod_base = OTHER; note = 2-prime-fluoroadenosine
  modified_base 19: mod_base = gm
  modified_base 20: mod_base = OTHER; note = 2-prime-fluoroguanosine
  source 1..20: mol_type = other RNA
tgctgaggaagctgaggagg

SEQ ID NO: 321 - RNA, 20 nt, synthetic construct
  misc_feature 1..20: note = Description of Artificial Sequence: Synthetic oligonucleotide
  modified_base 1..3: mod_base = OTHER; note = Phosphorothioate internucleotide linkage
  modified_base 1: mod_base = um
  modified_base 2: mod_base = OTHER; note = 2-prime-fluorocytidine
  modified_base 3: mod_base = gm
  modified_base 4: mod_base = OTHER; note = 2-prime-fluoroguanosine
  modified_base 5: mod_base = cm
  modified_base 6: mod_base = OTHER; note = 2-prime-fluorouridine
  modified_base 7: mod_base = gm
  modified_base 8: mod_base = OTHER; note = 2-prime-fluoroadenosine
  modified_base 9: mod_base = gm
  modified_base 10: mod_base = OTHER; note = 2-prime-fluoroguanosine
  modified_base 11: mod_base = OTHER; note = 2-prime-O-methyladenosine
  modified_base 12: mod_base = OTHER; note = 2-prime-fluoroadenosine
  modified_base 13..20: mod_base = OTHER; note = Phosphorothioate internucleotide linkage
  modified_base 13: mod_base = gm
  modified_base 14: mod_base = OTHER; note = 2-prime-fluorocytidine
  modified_base 15: mod_base = um
  modified_base 16: mod_base = OTHER; note = 2-prime-fluoroguanosine
  modified_base 17: mod_base = OTHER; note = 2-prime-O-methyladenosine
  modified_base 18: mod_base = OTHER; note = 2-prime-fluoroguanosine
  modified_base 19: mod_base = gm
  modified_base 20: mod_base = OTHER; note = 2-prime-fluoroadenosine
  source 1..20: mol_type = other RNA
tcggctgaggaagctgagga

SEQ ID NO: 322 - RNA, 20 nt, synthetic construct
  misc_feature 1..20: note = Description of Artificial Sequence: Synthetic oligonucleotide
  modified_base 1..3: mod_base = OTHER; note = Phosphorothioate internucleotide linkage
  modified_base 1: mod_base = um
  modified_base 2: mod_base = OTHER; note = 2-prime-fluoroguanosine
  modified_base 3: mod_base = OTHER; note = 2-prime-O-methyladenosine
  modified_base 4: mod_base = OTHER; note = 2-prime-fluoroguanosine
  modified_base 5: mod_base = gm
  modified_base 6: mod_base = OTHER; note = 2-prime-fluorocytidine
  modified_base 7: mod_base = OTHER; note = 2-prime-O-methyladenosine
  modified_base 8: mod_base = OTHER; note = 2-prime-fluoroguanosine
  modified_base 9: mod_base = cm
  modified_base 10: mod_base = OTHER; note = 2-prime-fluoroadenosine
  modified_base 11: mod_base = gm
  modified_base 12: mod_base = OTHER; note = 2-prime-fluorocytidine
  modified_base 13..20: mod_base = OTHER; note = Phosphorothioate internucleotide linkage
  modified_base 13: mod_base = gm
  modified_base 14: mod_base = OTHER; note = 2-prime-fluoroguanosine
  modified_base 15: mod_base = cm
  modified_base 16: mod_base = OTHER; note = 2-prime-fluorouridine
  modified_base 17: mod_base = gm
  modified_base 18: mod_base = OTHER; note = 2-prime-fluorouridine
  modified_base 19: mod_base = gm
  modified_base 20: mod_base = OTHER; note = 2-prime-fluorocytidine
  source 1..20: mol_type = other RNA
tgaggcagcagcggctgtgc

SEQ ID NO: 323 - RNA, 20 nt, synthetic construct
  misc_feature 1..20: note = Description of Artificial Sequence: Synthetic oligonucleotide
  modified_base 1..3: mod_base = OTHER; note = Phosphorothioate internucleotide linkage
  modified_base 1: mod_base = um
  modified_base 2: mod_base = OTHER; note = 2-prime-fluorocytidine
  modified_base 3: mod_base = cm
  modified_base 4: mod_base = OTHER; note = 2-prime-fluorocytidine
  modified_base 5: mod_base = gm
  modified_base 6: mod_base = OTHER; note = 2-prime-fluorocytidine
  modified_base 7: mod_base = OTHER; note = Phosphorothioate internucleotide linkage
  modified_base 8: mod_base = OTHER; note = 2-prime-fluorocytidine
  modified_base 9: mod_base = cm
  modified_base 10: mod_base = OTHER; note = 2-prime-fluorouridine
  modified_base 11: mod_base = cm
  modified_base 12: mod_base = OTHER; note = 2-prime-fluoroadenosine
  modified_base 13..20: mod_base = OTHER; note = Phosphorothioate internucleotide linkage
  modified_base 13: mod_base = gm
  modified_base 14: mod_base = OTHER; note = 2-prime-fluorocytidine
  modified_base 15: mod_base = cm
  modified_base 16: mod_base = OTHER; note = 2-prime-fluoroadenosine
  modified_base 17: mod_base = cm
  modified_base 18: mod_base = OTHER; note = 2-prime-fluoroadenosine
  modified_base 19: mod_base = gm
  modified_base 20: mod_base = OTHER; note = 2-prime-fluorocytidine
  source 1..20: mol_type = other RNA
tgcggctcctcagccacagc

SEQ ID NO: 324 - RNA, 20 nt, synthetic construct
  misc_feature 1..20: note = Description of Artificial Sequence: Synthetic oligonucleotide
  modified_base 1..3: mod_base = OTHER; note = Phosphorothioate internucleotide linkage
  modified_base 1: mod_base = um
  modified_base 2: mod_base = OTHER; note = 2-prime-fluorouridine
  modified_base 3: mod_base = gm
  modified_base 4: mod_base = OTHER; note = 2-prime-fluorocytidine
  modified_base 5: mod_base = OTHER; note = 2-prime-O-methyladenosine
  modified_base 6: mod_base = OTHER; note = 2-prime-fluoroguanosine
  modified_base 7: mod_base = cm
  modified_base 8: mod_base = OTHER; note = 2-prime-fluoroguanosine
  modified_base 9: mod_base = gm
  modified_base 10: mod_base = OTHER; note = 2-prime-fluorocytidine
  modified_base 11: mod_base = um
  modified_base 12: mod_base = OTHER; note = 2-prime-fluorocytidine
  modified_base 13..20: mod_base = OTHER; note = Phosphorothioate internucleotide linkage
  modified_base 13: mod_base = cm
  modified_base 14: mod_base = OTHER; note = 2-prime-fluorouridine
  modified_base 15: mod_base = cm
  modified_base 16: mod_base = OTHER; note = 2-prime-fluoroadenosine
  modified_base 17: mod_base = gm
  modified_base 18: mod_base = OTHER; note = 2-prime-fluorocytidine
  modified_base 19: mod_base = cm
  modified_base 20: mod_base = OTHER; note = 2-prime-fluoroadenosine
  source 1..20: mol_type = other RNA
ttgcagcggctcctcagcca

SEQ ID NO: 325 - RNA, 20 nt, synthetic construct
  misc_feature 1..20: note = Description of Artificial Sequence: Synthetic oligonucleotide
  modified_base 1..3: mod_base = OTHER; note = Phosphorothioate internucleotide linkage
  modified_base 1: mod_base = um
  modified_base 2: mod_base = OTHER; note = 2-prime-fluorouridine
  modified_base 3: mod_base = cm
  modified_base 4: mod_base = OTHER; note = 2-prime-fluoroguanosine
  modified_base 5: mod_base = gm
  modified_base 6: mod_base = OTHER; note = 2-prime-fluorouridine
  modified_base 7: mod_base = gm
  modified_base 8: mod_base = OTHER; note = 2-prime-fluorocytidine
  modified_base 9: mod_base = OTHER; note = 2-prime-O-methyladenosine
  modified_base 10: mod_base = OTHER; note = 2-prime-fluoroguanosine
  modified_base 11: mod_base = cm
  modified_base 12: mod_base = OTHER; note = 2-prime-fluoroguanosine
  modified_base 13..20: mod_base = OTHER; note = Phosphorothioate internucleotide linkage
  modified_base 13: mod_base = gm
  modified_base 14: mod_base = OTHER; note = 2-prime-fluorocytidine
  modified_base 15: mod_base = um
  modified_base 16: mod_base = OTHER; note = 2-prime-fluorocytidine
  modified_base 17: mod_base = cm
  modified_base 18: mod_base = OTHER; note = 2-prime-fluorouridine
  modified_base 19: mod_base = cm
  modified_base 20: mod_base = OTHER; note = 2-prime-fluoroadenosine
  source 1..20: mol_type = other RNA
ttcggtgcagcggctcctca

SEQ ID NO: 326 - RNA, 20 nt, synthetic construct
  misc_feature 1..20: note = Description of Artificial Sequence: Synthetic oligonucleotide
  modified_base 1..3: mod_base = OTHER; note = Phosphorothioate internucleotide linkage
  modified_base 1: mod_base = um
  modified_base 2: mod_base = OTHER; note = 2-prime-fluorouridine
  modified_base 3: mod_base = gm
  modified_base 4: mod_base = OTHER; note = 2-prime-fluorocytidine
  modified_base 4: mod_base = OTHER; note = 2-prime-fluoroguanosine
  modified_base 5: mod_base = um
  modified_base 7: mod_base = gm
  modified_base 8: mod_base = OTHER; note = 2-prime-fluoroguanosine
  modified_base 9: mod_base = um
  modified_base 10: mod_base = OTHER; note = 2-prime-fluoroguanosine
  modified_base 11: mod_base = cm
  modified_base 12: mod_base = OTHER; note = 2-prime-fluoroadenosine
  modified_base 13..20: mod_base = OTHER; note = Phosphorothioate internucleotide linkage
  modified_base 13: mod_base = gm
  modified_base 14: mod_base = OTHER; note = 2-prime-fluorocytidine
  modified_base 15: mod_base = gm
  modified_base 16: mod_base = OTHER; note = 2-prime-fluoroguanosine
  modified_base 17: mod_base = cm
  modified_base 18: mod_base = OTHER; note = 2-prime-fluorouridine
  modified_base 19: mod_base = cm
  modified_base 20: mod_base = OTHER; note = 2-prime-fluorocytidine
  source 1..20: mol_type = other RNA
ttggtcggtgcagcggctcc

SEQ ID NO: 327 - RNA, 15 nt, synthetic construct
  misc_feature 1..15: note = Description of Artificial Sequence: Synthetic oligonucleotide
  modified_base 1..3: mod_base = OTHER; note = Phosphorothioate internucleotide linkage
  modified_base 1: mod_base = OTHER; note = 2-prime-fluoroguanosine
  modified_base 2: mod_base = OTHER; note = 2-prime-O-methyladenosine
  modified_base 3: mod_base = OTHER; note = 2-prime-fluorocytidine
  modified_base 4: mod_base = cm
  modified_base 5: mod_base = OTHER; note = 2-prime-fluorocytidine
  modified_base 6: mod_base = um
  modified_base 7: mod_base = OTHER; note = 2-prime-fluoroguanosine
  modified_base 8: mod_base = gm
  modified_base 9: mod_base = OTHER; note = 2-prime-fluoroadenosine
  modified_base 10: mod_base = OTHER; note = 2-prime-O-methyladenosine
  modified_base 11: mod_base = OTHER; note = 2-prime-fluoroadenosine
  modified_base 12: mod_base = OTHER; note = 2-prime-O-methyladenosine
  modified_base 13: mod_base = OTHER; note = 2-prime-fluoroguanosine
  modified_base 13..15: mod_base = OTHER; note = Phosphorothioate internucleotide linkage
  modified_base 14: mod_base = cm
  modified_base 15: mod_base = OTHER; note = 2-prime-fluoroadenosine
  source 1..15: mol_type = other RNA
gaccctggaaaagca

SEQ ID NO: 328 - RNA, 15 nt, synthetic construct
  misc_feature 1..15: note = Description of Artificial Sequence: Synthetic oligonucleotide
  modified_base 1..3: mod_base = OTHER; note = Phosphorothioate internucleotide linkage
  modified_base 1: mod_base = OTHER; note = 2-prime-fluorocytidine
  modified_base 2: mod_base = cm
  modified_base 3: mod_base = OTHER; note = 2-prime-fluorocytidine
  modified_base 4: mod_base = um
  modified_base 5: mod_base = OTHER; note = 2-prime-fluoroguanosine
  modified_base 6: mod_base = gm
  modified_base 7: mod_base = OTHER; note = 2-prime-fluoroadenosine
  modified_base 8: mod_base = OTHER; note = 2-prime-O-methyladenosine
  modified_base 9: mod_base = OTHER; note = 2-prime-fluoroadenosine
  modified_base 10: mod_base = OTHER; note = 2-prime-O-methyladenosine
  modified_base 11: mod_base = OTHER; note = 2-prime-fluoroguanosine
  modified_base 12: mod_base = cm
  modified_base 13: mod_base = OTHER; note = 2-prime-fluorouridine
  modified_base 13..15: mod_base = OTHER; note = Phosphorothioate internucleotide linkage
  modified_base 14: mod_base = gm
  modified_base 15: mod_base = OTHER; note = 2-prime-fluoroadenosine
  source 1..15: mol_type = other RNA
ccctggaaaagctga

SEQ ID NO: 329 - RNA, 15 nt, synthetic construct
  misc_feature 1..15: note = Description of Artificial Sequence: Synthetic oligonucleotide
  modified_base 1..3: mod_base = OTHER; note = Phosphorothioate internucleotide linkage
  modified_base 1: mod_base = OTHER; note = 2-prime-fluorocytidine
  modified_base 3: mod_base = um
  modified_base 3: mod_base = OTHER; note = 2-prime-fluoroguanosine
  modified_base 4: mod_base = gm
  modified_base 5: mod_base = OTHER; note = 2-prime-fluoroadenosine
  modified_base 6: mod_base = OTHER; note = 2-prime-O-methyladenosine
  modified_base 7: mod_base = OTHER; note = 2-prime-fluoroadenosine
  modified_base 8: mod_base = OTHER; note = 2-prime-O-methyladenosine
  modified_base 9: mod_base = OTHER; note = 2-prime-fluoroguanosine
  modified_base 10: mod_base = cm
  modified_base 11: mod_base = OTHER; note = 2-prime-fluorouridine
  modified_base 12: mod_base = gm
  modified_base 13..15: mod_base = OTHER; note = Phosphorothioate internucleotide linkage
  modified_base 13: mod_base = OTHER; note = 2-prime-fluoroadenosine
  modified_base 14: mod_base = um
  modified_base 15: mod_base = OTHER; note = 2-prime-fluoroadenosine
  source 1..15: mol_type = other RNA
ctggaaaagctgata

SEQ ID NO: 330 - RNA, 15 nt, synthetic construct
  misc_feature 1..15: note = Description of Artificial Sequence: Synthetic oligonucleotide
  modified_base 1..3: mod_base = OTHER; note = Phosphorothioate internucleotide linkage
  modified_base 1: mod_base = OTHER; note = 2-prime-fluoroguanosine
  modified_base 2: mod_base = OTHER; note = 2-prime-O-methyladenosine
  modified_base 3: mod_base = OTHER; note = 2-prime-fluoroadenosine
  modified_base 4: mod_base = OTHER; note = 2-prime-O-methyladenosine
  modified_base 5: mod_base = OTHER; note = 2-prime-fluoroadenosine
  modified_base 6: mod_base = gm
  modified_base 7: mod_base = OTHER; note = 2-prime-fluorocytidine
  modified_base 8: mod_base = um
  modified_base 9: mod_base = OTHER; note = 2-prime-fluoroguanosine
  modified_base 10: mod_base = OTHER; note = 2-prime-O-methyladenosine
  modified_base 11: mod_base = OTHER; note = 2-prime-O-methyladenosine
  modified_base 12: mod_base = gm
  modified_base 13..15: mod_base = OTHER; note = Phosphorothioate internucleotide linkage
  modified_base 13: mod_base = OTHER; note = 2-prime-fluoroadenosine
  modified_base 14: mod_base = OTHER; note = 2-prime-O-methyladenosine
  modified_base 15: mod_base = OTHER; note = 2-prime-fluoroadenosine
  source 1..15: mol_type = other RNA
gaaaagctgatgaaa

SEQ ID NO: 331 - RNA, 15 nt, synthetic construct
  misc_feature 1..15: note = Description of Artificial Sequence: Synthetic oligonucleotide
  modified_base 1..3: mod_base = OTHER; note = Phosphorothioate internucleotide linkage
  modified_base 1: mod_base = OTHER; note = 2-prime-fluoroadenosine
  modified_base 2: mod_base = OTHER; note = 2-prime-O-methyladenosine
  modified_base 3: mod_base = OTHER; note = 2-prime-fluoroadenosine
  modified_base 4: mod_base = gm
  modified_base 5: mod_base = OTHER; note = 2-prime-fluorocytidine
  modified_base 6: mod_base = um
  modified_base 7: mod_base = OTHER; note = 2-prime-fluoroguanosine
  modified_base 8: mod_base = OTHER; note = 2-prime-O-methyladenosine
  modified_base 9: mod_base = OTHER; note = 2-prime-O-methyladenosine
  modified_base 10: mod_base = gm
  modified_base 11: mod_base = OTHER; note = 2-prime-fluoroadenosine
  modified_base 12: mod_base = OTHER; note = 2-prime-O-methyladenosine
  modified_base 13..15: mod_base = OTHER; note = Phosphorothioate internucleotide linkage
  modified_base 13: mod_base = OTHER; note = 2-prime-fluoroguanosine
  modified_base 14: mod_base = gm
  modified_base 15: mod_base = OTHER; note = 2-prime-fluoroadenosine
  source 1..15: mol_type = other RNA
aaagctgatgaagga

SEQ ID NO: 332 - RNA, 15 nt, synthetic construct
  misc_feature 1..15: note = Description of Artificial Sequence: Synthetic oligonucleotide
  modified_base 1..3: mod_base = OTHER; note = Phosphorothioate internucleotide linkage
  modified_base 1: mod_base = OTHER; note = 2-prime-fluoroadenosine
  modified_base 2: mod_base = gm
  modified_base 3: mod_base = OTHER; note = 2-prime-fluorocytidine
  modified_base 4: mod_base = um
  modified_base 5: mod_base = OTHER; note = 2-prime-fluoroguanosine
  modified_base 6: mod_base = OTHER; note = 2-prime-O-methyladenosine
  modified_base 7: mod_base = OTHER; note = 2-prime-fluorouridine
  modified_base 8: mod_base = gm
  modified_base 9: mod_base = OTHER; note = 2-prime-fluoroadenosine
  modified_base 10: mod_base = OTHER; note = 2-prime-O-methyladenosine
  modified_base 11: mod_base = OTHER; note = 2-prime-fluoroguanosine
  modified_base 12: mod_base = gm
  modified_base 13..15: mod_base = OTHER; note = Phosphorothioate internucleotide linkage
  modified_base 13: mod_base = OTHER; note = 2-prime-fluorocytidine
  modified_base 14: mod_base = cm
  modified_base 15: mod_base = OTHER; note = 2-prime-fluoroadenosine
  source 1..15: mol_type = other RNA
agctgatgaaggcca

SEQ ID NO: 333 - RNA, 15 nt, synthetic construct
  misc_feature 1..15: note = Description of Artificial Sequence: Synthetic oligonucleotide
  modified_base 1..3: mod_base = OTHER; note = Phosphorothioate internucleotide linkage
  modified_base 1: mod_base = OTHER; note = 2-prime-fluorouridine
  modified_base 3: mod_base = gm
  modified_base 3: mod_base = OTHER; note = 2-prime-fluoroadenosine
  modified_base 4: mod_base = OTHER; note = 2-prime-O-methyladenosine
  modified_base 5: mod_base = OTHER; note = 2-prime-fluoroguanosine
  modified_base 6: mod_base = gm
  modified_base 7: mod_base = OTHER; note = 2-prime-fluorocytidine
  modified_base 8: mod_base = cm
  modified_base 9: mod_base = OTHER; note = 2-prime-fluorouridine
  modified_base 10: mod_base = um
  modified_base 11: mod_base = OTHER; note = 2-prime-fluorocytidine
  modified_base 12: mod_base = gm
  modified_base 13: mod_base = OTHER; note = 2-prime-fluoroadenosine
  modified_base 14: mod_base = gm
  modified_base 13..15: mod_base = OTHER; note = Phosphorothioate internucleotide linkage
  modified_base 15: mod_base = OTHER; note = 2-prime-fluoroadenosine
  source 1..15: mol_type = other RNA
tgaaggccttcgaga

SEQ ID NO: 334 - RNA, 15 nt, synthetic construct
  misc_feature 1..15: note = Description of Artificial Sequence: Synthetic oligonucleotide
  modified_base 1..3: mod_base = OTHER; note = Phosphorothioate internucleotide linkage
  modified_base 1: mod_base = OTHER; note = 2-prime-fluoroadenosine
  modified_base 2: mod_base = OTHER; note = 2-prime-O-methyladenosine
  modified_base 3: mod_base = OTHER; note = 2-prime-fluoroguanosine
  modified_base 4: mod_base = gm
  modified_base 5: mod_base = OTHER; note = 2-prime-fluorocytidine
  modified_base 6: mod_base = cm
  modified_base 7: mod_base = OTHER; note = 2-prime-fluorouridine
  modified_base 8: mod_base = um
  modified_base 9: mod_base = OTHER; note = 2-prime-fluorocytidine
  modified_base 10: mod_base = gm
  modified_base 11: mod_base = OTHER; note = 2-prime-fluoroadenosine
  modified_base 12: mod_base = gm
  modified_base 13..15: mod_base = OTHER; note = Phosphorothioate internucleotide linkage
  modified_base 13: mod_base = OTHER; note = 2-prime-fluorouridine
  modified_base 14: mod_base = cm
  modified_base 15: mod_base = OTHER; note = 2-prime-fluoroadenosine
  source 1..15: mol_type = other RNA
aaggccttcgagtca

SEQ ID NO: 335 - RNA, 15 nt, synthetic construct
  misc_feature 1..15: note = Description of Artificial Sequence: Synthetic oligonucleotide
  modified_base 1..3: mod_base = OTHER; note = Phosphorothioate internucleotide linkage
  modified_base 1: mod_base = OTHER; note = 2-prime-fluorouridine
  modified_base 2: mod_base = um
  modified_base 3: mod_base = OTHER; note = 2-prime-fluorocytidine
  modified_base 4: mod_base = gm
  modified_base 5: mod_base = OTHER; note = 2-prime-fluoroadenosine
  modified_base 6: mod_base = gm
  modified_base 7: mod_base = OTHER; note = 2-prime-fluorouridine
  modified_base 8: mod_base = cm
  modified_base 9: mod_base = OTHER; note = 2-prime-fluorocytidine
  modified_base 10: mod_base = cm
  modified_base 11: mod_base = OTHER; note = 2-prime-fluorouridine
  modified_base 12: mod_base = cm
  modified_base 13..15: mod_base = OTHER; note = Phosphorothioate internucleotide linkage
  modified_base 13: mod_base = OTHER; note = 2-prime-fluoroadenosine
  modified_base 14: mod_base = OTHER; note = 2-prime-O-methyladenosine
  modified_base 15: mod_base = OTHER; note = 2-prime-fluoroadenosine
  source 1..15: mol_type = other RNA
ttcgagtccctcaaa

SEQ ID NO: 336 - RNA, 15 nt, synthetic construct
  misc_feature 1..15: note = Description of Artificial Sequence: Synthetic oligonucleotide
  modified_base 1..3: mod_base = OTHER; note = Phosphorothioate internucleotide linkage
  modified_base 1: mod_base = OTHER; note = 2-prime-fluorocytidine
  modified_base 2: mod_base = gm
  modified_base 3: mod_base = OTHER; note = 2-prime-fluoroadenosine
  modified_base 4: mod_base = gm
  modified_base 5: mod_base = OTHER; note = 2-prime-fluorouridine
  modified_base 6: mod_base = cm
  modified_base 7: mod_base = OTHER; note = 2-prime-fluorocytidine
  modified_base 8: mod_base = cm
  modified_base 9: mod_base = OTHER; note = 2-prime-fluorouridine
  modified_base 10: mod_base = cm
  modified_base 11: mod_base = OTHER; note = 2-prime-fluoroadenosine
  modified_base 12: mod_base = OTHER; note = 2-prime-O-methyladenosine
  modified_base 13..15: mod_base = OTHER; note = Phosphorothioate internucleotide linkage
  modified_base 13: mod_base = OTHER; note = 2-prime-fluoroguanosine
  modified_base 13: mod_base = OTHER; note = 2-prime-fluoroguanosine
  modified_base 14: mod_base = um
  modified_base 15: mod_base = OTHER; note = 2-prime-fluoroadenosine
  source 1..15: mol_type = other RNA
cgagtccctcaagta

SEQ ID NO: 337 - RNA, 15 nt, synthetic construct
  misc_feature 1..15: note = Description of Artificial Sequence: Synthetic oligonucleotide
  modified_base 1..3: mod_base = OTHER; note = Phosphorothioate internucleotide linkage
  modified_base 1: mod_base = OTHER; note = 2-prime-fluoroadenosine
  modified_base 2: mod_base = gm
  modified_base 3: mod_base = OTHER; note = 2-prime-fluorouridine
  modified_base 4: mod_base = cm
  modified_base 5: mod_base = OTHER; note = 2-prime-fluorocytidine
  modified_base 6: mod_base = cm
  modified_base 7: mod_base = OTHER; note = 2-prime-fluorouridine
  modified_base 8: mod_base = cm
  modified_base 9: mod_base = OTHER; note = 2-prime-fluoroadenosine
  modified_base 10: mod_base = OTHER; note = 2-prime-O-methyladenosine
  modified_base 11: mod_base = OTHER; note = 2-prime-fluoroguanosine
  modified_base 12: mod_base = um
  modified_base 13..15: mod_base = OTHER; note = Phosphorothioate internucleotide linkage
  modified_base 13: mod_base = OTHER; note = 2-prime-fluorocytidine
  modified_base 14: mod_base = cm
  modified_base 15: mod_base = OTHER; note = 2-prime-fluoroadenosine
  source 1..15: mol_type = other RNA
agtccctcaagtcca

SEQ ID NO: 338 - RNA, 15 nt, synthetic construct
  misc_feature 1..15: note = Description of Artificial Sequence: Synthetic oligonucleotide
  modified_base 1..3: mod_base = OTHER; note = Phosphorothioate internucleotide linkage
  modified_base 1: mod_base = OTHER; note = 2-prime-fluorouridine
  modified_base 2: mod_base = cm
  modified_base 3: mod_base = OTHER; note = 2-prime-fluorocytidine
  modified_base 4: mod_base = cm
  modified_base 5: mod_base = OTHER; note = 2-prime-fluorouridine
  modified_base 6: mod_base = cm
  modified_base 7: mod_base = OTHER; note = 2-prime-fluoroadenosine
  modified_base 8: mod_base = OTHER; note = 2-prime-O-methyladenosine
  modified_base 9: mod_base = OTHER; note = 2-prime-fluoroguanosine
  modified_base 10: mod_base = um
  modified_base 11: mod_base = OTHER; note = 2-prime-fluorocytidine
  modified_base 12: mod_base = cm
  modified_base 13..15: mod_base = OTHER; note = Phosphorothioate internucleotide linkage
  modified_base 13: mod_base = OTHER; note = 2-prime-fluorouridine
  modified_base 14: mod_base = um
  modified_base 15: mod_base = OTHER; note = 2-prime-fluoroadenosine
  source 1..15: mol_type = other RNA
tccctcaagtcctta

SEQ ID NO: 339 - RNA, 15 nt, synthetic construct
  misc_feature 1..15: note = Description of Artificial Sequence: Synthetic oligonucleotide
  modified_base 1..3: mod_base = OTHER; note = Phosphorothioate internucleotide linkage
  modified_base 1: mod_base = OTHER; note = 2-prime-fluorocytidine
  modified_base 2: mod_base = cm
  modified_base 3: mod_base = OTHER; note = 2-prime-fluorouridine
  modified_base 4: mod_base = cm
  modified_base 5: mod_base = OTHER; note = 2-prime-fluoroadenosine
  modified_base 6: mod_base = OTHER; note = 2-prime-O-methyladenosine
  modified_base 7: mod_base = OTHER; note = 2-prime-fluoroguanosine
  modified_base 8: mod_base = um
  modified_base 9: mod_base = OTHER; note = 2-prime-fluorocytidine
  modified_base 10: mod_base = cm
  modified_base 11: mod_base = OTHER; note = 2-prime-fluorouridine
  modified_base 12: mod_base = um
  modified_base 13..15: mod_base = OTHER; note = Phosphorothioate internucleotide linkage
  modified_base 13: mod_base = OTHER; note = 2-prime-fluorocytidine
  modified_base 14: mod_base = cm
  modified_base 15: mod_base = OTHER; note = 2-prime-fluoroadenosine
  source 1..15: mol_type = other RNA
cctcaagtccttcca

SEQ ID NO: 340 - RNA, 15 nt, synthetic construct
  misc_feature 1..15: note = Description of Artificial Sequence: Synthetic oligonucleotide
  modified_base 1..3: mod_base = OTHER; note = Phosphorothioate internucleotide linkage
  modified_base 1: mod_base = OTHER; note = 2-prime-fluorocytidine
  modified_base 2: mod_base = OTHER; note = 2-prime-O-methyladenosine
  modified_base 3: mod_base = OTHER; note = 2-prime-fluoroadenosine
  modified_base 4: mod_base = gm
  modified_base 5: mod_base = OTHER; note = 2-prime-fluorouridine
  modified_base 6: mod_base = cm
  modified_base 7: mod_base = OTHER; note = 2-prime-fluorocytidine
  modified_base 8: mod_base = um
  modified_base 9: mod_base = OTHER; note = 2-prime-fluorouridine
  modified_base 10: mod_base = cm
  modified_base 11: mod_base = OTHER; note = 2-prime-fluorocytidine
  modified_base 12: mod_base = OTHER; note = 2-prime-O-methyladenosine
  modified_base 13..15: mod_base = OTHER; note = Phosphorothioate internucleotide linkage
  modified_base 13: mod_base = OTHER; note = 2-prime-fluoroguanosine
  modified_base 14: mod_base = cm
  modified_base 15: mod_base = OTHER; note = 2-prime-fluoroadenosine
  source 1..15: mol_type = other RNA
caagtccttccagca

SEQ ID NO: 341 - RNA, 15 nt, synthetic construct
  misc_feature 1..15: note = Description of Artificial Sequence: Synthetic oligonucleotide
  modified_base 1..3: mod_base = OTHER; note = Phosphorothioate internucleotide linkage
  modified_base 1: mod_base = OTHER; note = 2-prime-fluorocytidine
  modified_base 2: mod_base = OTHER; note = 2-prime-O-methyladenosine
  modified_base 3: mod_base = OTHER; note = 2-prime-fluoroguanosine
  modified_base 4: mod_base = cm
  modified_base 5: mod_base = OTHER; note = 2-prime-fluoroadenosine
  modified_base 6: mod_base = OTHER; note = 2-prime-O-methyladenosine
  modified_base 7: mod_base = OTHER; note = 2-prime-fluorocytidine
  modified_base 8: mod_base = OTHER; note = 2-prime-O-methyladenosine
  modified_base 9: mod_base = OTHER; note = 2-prime-fluoroguanosine
  modified_base 10: mod_base = cm
  modified_base 11: mod_base = OTHER; note = 2-prime-fluorocytidine
  modified_base 12: mod_base = gm
  modified_base 13..15: mod_base = OTHER; note = Phosphorothioate internucleotide linkage
  modified_base 13: mod_base = OTHER; note = 2-prime-fluorocytidine
  modified_base 14: mod_base = cm
  modified_base 15: mod_base = OTHER; note = 2-prime-fluoroadenosine
  source 1..15: mol_type = other RNA
cagcaacagccgcca

SEQ ID NO: 342 - RNA, 15 nt, synthetic construct
  misc_feature 1..15: note = Description of Artificial Sequence: Synthetic oligonucleotide
  modified_base 1..3: mod_base = OTHER; note = Phosphorothioate internucleotide linkage
  modified_base 1: mod_base = OTHER; note = 2-prime-fluorocytidine
  modified_base 2: mod_base = OTHER; note = 2-prime-O-methyladenosine
  modified_base 3: mod_base = OTHER; note = 2-prime-fluoroadenosine
  modified_base 4: mod_base = cm
  modified_base 5: mod_base = OTHER; note = 2-prime-fluoroadenosine
  modified_base 6: mod_base = gm
  modified_base 7: mod_base = OTHER; note = 2-prime-fluorocytidine
  modified_base 8: mod_base = cm
  modified_base 9: mod_base = OTHER; note = 2-prime-fluoroguanosine
  modified_base 10: mod_base = cm
  modified_base 11: mod_base = OTHER; note = 2-prime-fluorocytidine
  modified_base 12: mod_base = OTHER; note = 2-prime-O-methyladenosine
  modified_base 13..15: mod_base = OTHER; note = Phosphorothioate internucleotide linkage
  modified_base 13: mod_base = OTHER; note = 2-prime-fluorocytidine
  modified_base 14: mod_base = cm
  modified_base 15: mod_base = OTHER; note = 2-prime-fluoroadenosine
  source 1..15: mol_type = other RNA
caacagccgccacca

SEQ ID NO: 343 - RNA, 15 nt, synthetic construct
  misc_feature 1..15: note = Description of Artificial Sequence: Synthetic oligonucleotide
  modified_base 1..3: mod_base = OTHER; note = Phosphorothioate internucleotide linkage
  modified_base 1: mod_base = OTHER; note = 2-prime-fluorocytidine
  modified_base 2: mod_base = cm
  modified_base 3: mod_base = OTHER; note = 2-prime-fluorouridine
  modified_base 4: mod_base = cm
  modified_base 5: mod_base = OTHER; note = 2-prime-fluoroadenosine
  modified_base 6: mod_base = gm
  modified_base 7: mod_base = OTHER; note = 2-prime-fluorocytidine
  modified_base 8: mod_base = um
  modified_base 9: mod_base = OTHER; note = 2-prime-fluorouridine
  modified_base 10: mod_base = cm
  modified_base 11: mod_base = OTHER; note = 2-prime-fluorocytidine
  modified_base 12: mod_base = um
  modified_base 13..15: mod_base = OTHER; note = Phosphorothioate internucleotide linkage
  modified_base 13: mod_base = OTHER; note = 2-prime-fluorocytidine
  modified_base 14: mod_base = OTHER; note = 2-prime-O-methyladenosine
  modified_base 15: mod_base = OTHER; note = 2-prime-fluoroadenosine
  source 1..15: mol_type = other RNA
cctcagcttcctcaa

SEQ ID NO: 344 - RNA, 15 nt, synthetic construct
  misc_feature 1..15: note = Description of Artificial Sequence: Synthetic oligonucleotide
  modified_base 1..3: mod_base = OTHER; note = Phosphorothioate internucleotide linkage
  modified_base 1: mod_base = OTHER; note = 2-prime-fluorouridine
  modified_base 2: mod_base = cm
  modified_base 3: mod_base = OTHER; note = 2-prime-fluoroadenosine
  modified_base 4: mod_base = gm
  modified_base 5: mod_base = OTHER; note = 2-prime-fluorocytidine
  modified_base 6: mod_base = um
  modified_base 7: mod_base = OTHER; note = 2-prime-fluorouridine
  modified_base 8: mod_base = cm
  modified_base 9: mod_base = OTHER; note = 2-prime-fluorocytidine
  modified_base 10: mod_base = um
  modified_base 11: mod_base = OTHER; note = 2-prime-fluorocytidine
  modified_base 12: mod_base = OTHER; note = 2-prime-O-methyladenosine
  modified_base 13..15: mod_base = OTHER; note = Phosphorothioate internucleotide linkage
  modified_base 13: mod_base = OTHER; note = 2-prime-fluoroguanosine
  modified_base 14: mod_base = cm
  modified_base 15: mod_base = OTHER; note = 2-prime-fluoroadenosine
  source 1..15: mol_type = other RNA
tcagcttcctcagca

SEQ ID NO: 345 - RNA, 15 nt, synthetic construct
  misc_feature 1..15: note = Description of Artificial Sequence: Synthetic oligonucleotide
  modified_base 1..3: mod_base = OTHER; note = Phosphorothioate internucleotide linkage
  modified_base 1: mod_base = OTHER; note = 2-prime-fluoroadenosine
  modified_base 2: mod_base = gm
  modified_base 3: mod_base = OTHER; note = 2-prime-fluorocytidine
  modified_base 4: mod_base = um
  modified_base 5: mod_base = OTHER; note = 2-prime-fluorouridine
  modified_base 6: mod_base = cm
  modified_base 7: mod_base = OTHER; note = 2-prime-fluorocytidine
  modified_base 8: mod_base = um
  modified_base 9: mod_base = OTHER; note = 2-prime-fluorocytidine
  modified_base 10: mod_base = OTHER; note = 2-prime-O-methyladenosine
  modified_base 11: mod_base = OTHER; note = 2-prime-fluoroguanosine
  modified_base 12: mod_base = cm
  modified_base 13..15: mod_base = OTHER; note = Phosphorothioate internucleotide linkage
  modified_base 13: mod_base = OTHER; note = 2-prime-fluorocytidine
  modified_base 14: mod_base = gm
  modified_base 15: mod_base = OTHER; note = 2-prime-fluoroadenosine
  source 1..15: mol_type = other RNA
agcttcctcagccga

SEQ ID NO: 346 - RNA, 15 nt, synthetic construct
  misc_feature 1..15: note = Description of Artificial Sequence: Synthetic oligonucleotide
  modified_base 1..3: mod_base = OTHER; note = Phosphorothioate internucleotide linkage
  modified_base 1: mod_base = OTHER; note = 2-prime-fluoroguanosine
  modified_base 2: mod_base = cm
  modified_base 3: mod_base = OTHER; note = 2-prime-fluorocytidine
  modified_base 4: mod_base = gm
  modified_base 5: mod_base = OTHER; note = 2-prime-fluorocytidine
  modified_base 6: mod_base = um
  modified_base 7: mod_base = OTHER; note = 2-prime-fluoroguanosine
  modified_base 8: mod_base = cm
  modified_base 9: mod_base = OTHER; note = 2-prime-fluorouridine
  modified_base 10: mod_base = gm
  modified_base 11: mod_base = OTHER; note = 2-prime-fluorocytidine
  modified_base 12: mod_base = cm
  modified_base 13..15: mod_base = OTHER; note = Phosphorothioate internucleotide linkage
  modified_base 13: mod_base = OTHER; note = 2-prime-fluorouridine
  modified_base 14: mod_base = cm
  modified_base 15: mod_base = OTHER; note = 2-prime-fluoroadenosine
  source 1..15: mol_type = other RNA
gccgctgctgcctca

SEQ ID NO: 347 - RNA, 15 nt, synthetic construct
  misc_feature 1..15: note = Description of Artificial Sequence: Synthetic oligonucleotide
  modified_base 1..3: mod_base = OTHER; note = Phosphorothioate internucleotide linkage
  modified_base 1: mod_base = OTHER; note = 2-prime-fluoroguanosine
  modified_base 2: mod_base = gm
  modified_base 3: mod_base = OTHER; note = 2-prime-fluorocytidine
  modified_base 4: mod_base = um
  modified_base 5: mod_base = OTHER; note = 2-prime-fluoroguanosine
  modified_base 6: mod_base = OTHER; note = 2-prime-O-methyladenosine
  modified_base 7: mod_base = OTHER; note = 2-prime-fluoroguanosine
  modified_base 8: mod_base = gm
  modified_base 9: mod_base = OTHER; note = 2-prime-fluoroadenosine
  modified_base 10: mod_base = gm
  modified_base 11: mod_base = OTHER; note = 2-prime-fluorocytidine
  modified_base 12: mod_base = cm
  modified_base 13..15: mod_base = OTHER; note = Phosphorothioate internucleotide linkage
  modified_base 13: mod_base = OTHER; note = 2-prime-fluoroguanosine
  modified_base 14: mod_base = cm
  modified_base 15: mod_base = OTHER; note = 2-prime-fluoroadenosine
  source 1..15: mol_type = other RNA
ggctgaggagccgca

SEQ ID NO: 348 - RNA, 15 nt, synthetic construct
  misc_feature 1..15: note = Description of Artificial Sequence: Synthetic oligonucleotide
  modified_base 1..3: mod_base = OTHER; note = Phosphorothioate internucleotide linkage
  modified_base 1: mod_base = OTHER; note = 2-prime-fluoroguanosine
  modified_base 2: mod_base = OTHER; note = 2-prime-O-methyladenosine
  modified_base 3: mod_base = OTHER; note = 2-prime-fluoroguanosine
  modified_base 4: mod_base = gm
  modified_base 5: mod_base = OTHER; note = 2-prime-fluoroadenosine
  modified_base 6: mod_base = gm
  modified_base 7: mod_base = OTHER; note = 2-prime-fluorocytidine
  modified_base 8: mod_base = cm
  modified_base 9: mod_base = OTHER; note = 2-prime-fluoroguanosine
  modified_base 10: mod_base = cm
  modified_base 11: mod_base = OTHER; note = 2-prime-fluorouridine
  modified_base 12: mod_base = gm
  modified_base 13..15: mod_base = OTHER; note = Phosphorothioate internucleotide linkage
  modified_base 13: mod_base = OTHER; note = 2-prime-fluorocytidine
  modified_base 14: mod_base = OTHER; note = 2-prime-O-methyladenosine
  modified_base 15: mod_base = OTHER; note = 2-prime-fluoroadenosine
  source 1..15: mol_type = other RNA
gaggagccgctgcaa

SEQ ID NO: 349 - RNA, 15 nt, synthetic construct
  misc_feature 1..15: note = Description of Artificial Sequence: Synthetic oligonucleotide
  modified_base 1..3: mod_base = OTHER; note = Phosphorothioate internucleotide linkage
  modified_base 1: mod_base = OTHER; note = 2-prime-fluoroadenosine
  modified_base 2: mod_base = gm
  modified_base 3: mod_base = OTHER; note = 2-prime-fluorocytidine
  modified_base 4: mod_base = cm
  modified_base 5: mod_base = OTHER; note = 2-prime-fluoroguanosine
  modified_base 6: mod_base = cm
  modified_base 7: mod_base = OTHER; note = 2-prime-fluorouridine
  modified_base 8: mod_base = gm
  modified_base 9: mod_base = OTHER; note = 2-prime-fluorocytidine
  modified_base 10: mod_base = OTHER; note = 2-prime-O-methyladenosine
  modified_base 11: mod_base = OTHER; note = 2-prime-fluorocytidine
  modified_base 12: mod_base = cm
  modified_base 13..15: mod_base = OTHER; note = Phosphorothioate internucleotide linkage
  modified_base 13: mod_base = OTHER; note = 2-prime-fluoroguanosine
  modified_base 14: mod_base = OTHER; note = 2-prime-O-methyladenosine
  modified_base 15: mod_base = OTHER; note = 2-prime-fluoroadenosine
  source 1..15: mol_type = other RNA
agccgctgcaccgaa

SEQ ID NO: 350 - RNA, 15 nt, synthetic construct
  misc_feature 1..15: note = Description of Artificial Sequence: Synthetic oligonucleotide
  modified_base 1..3: mod_base = OTHER; note = Phosphorothioate internucleotide linkage
  modified_base 1: mod_base = OTHER; note = 2-prime-fluorocytidine
  modified_base 2: mod_base = gm
  modified_base 3: mod_base = OTHER; note = 2-prime-fluorocytidine
  modified_base 4: mod_base = um
  modified_base 5: mod_base = OTHER; note = 2-prime-fluoroguanosine
  modified_base 6: mod_base = cm
  modified_base 7: mod_base = OTHER; note = 2-prime-fluoroadenosine
  modified_base 8: mod_base = cm
  modified_base 9: mod_base = OTHER; note = 2-prime-fluorocytidine
  modified_base 10: mod_base = gm
  modified_base 11: mod_base = OTHER; note = 2-prime-fluoroadenosine
  modified_base 12: mod_base = cm
  modified_base 13..15: mod_base = OTHER; note = Phosphorothioate internucleotide linkage
  modified_base 13: mod_base = OTHER; note = 2-prime-fluorocytidine
  modified_base 14: mod_base = OTHER; note = 2-prime-O-methyladenosine
  modified_base 15: mod_base = OTHER; note = 2-prime-fluoroadenosine
  source 1..15: mol_type = other RNA
cgctgcaccgaccaa

SEQ ID NO: 351 - RNA, 20 nt, synthetic construct
  misc_feature 1..20: note = Description of Artificial Sequence: Synthetic oligonucleotide
  modified_base 1: mod_base = um
  modified_base 1..3: mod_base = OTHER; note = Phosphorothioate internucleotide linkage
  modified_base 2: mod_base = OTHER; note = 2-prime-fluorouridine
  modified_base 3: mod_base = um
  modified_base 4: mod_base = OTHER; note = 2-prime-fluoroadenosine
  modified_base 5: mod_base = cm
  modified_base 6: mod_base = OTHER; note = 2-prime-fluoroadenosine
  modified_base 7: mod_base = cm
  modified_base 8: mod_base = OTHER; note = 2-prime-fluoroguanosine
  modified_base 9: mod_base = gm
  modified_base 10: mod_base = OTHER; note = 2-prime-fluoroguanosine
  modified_base 11: mod_base = cm
  modified_base 12: mod_base = OTHER; note = 2-prime-fluoroadenosine
  modified_base 13: mod_base = um
  modified_base 13..20: mod_base = OTHER; note = Phosphorothioate internucleotide linkage
  modified_base 14: mod_base = OTHER; note = 2-prime-fluoroadenosine
  modified_base 15: mod_base = gm
  modified_base 16: mod_base = OTHER; note = 2-prime-fluoroadenosine
  modified_base 17: mod_base = OTHER; note = 2-prime-O-methyladenosine
  modified_base 18: mod_base = OTHER; note = 2-prime-fluoroadenosine
  modified_base 19: mod_base = gm
  modified_base 20: mod_base = OTHER; note = 2-prime-fluoroadenosine
  source 1..20: mol_type = other RNA
tttacacgggcatagaaaga

SEQ ID NO: 352 - RNA, 20 nt, synthetic construct
  misc_feature 1..20: note = Description of Artificial Sequence: Synthetic oligonucleotide
  modified_base 1: mod_base = um
  modified_base 1..3: mod_base = OTHER; note = Phosphorothioate internucleotide linkage
  modified_base 2: mod_base = OTHER; note = 2-prime-fluorouridine
  modified_base 3: mod_base = OTHER; note = 2-prime-O-methyladenosine
  modified_base 4: mod_base = OTHER; note = 2-prime-fluorocytidine
  modified_base 5: mod_base = um
  modified_base 6: mod_base = OTHER; note = 2-prime-fluorouridine
  modified_base 7: mod_base = um
  modified_base 8: mod_base = OTHER; note = 2-prime-fluoroadenosine
  modified_base 9: mod_base = cm
  modified_base 10: mod_base = OTHER; note = 2-prime-fluoroadenosine
  modified_base 11: mod_base = cm
  modified_base 12: mod_base = OTHER; note = 2-prime-fluoroguanosine
  modified_base 13: mod_base = gm
  modified_base 13..20: mod_base = OTHER; note = Phosphorothioate internucleotide linkage
  modified_base 14: mod_base = OTHER; note = 2-prime-fluoroguanosine
  modified_base 15: mod_base = cm
  modified_base 16: mod_base = OTHER; note = 2-prime-fluoroadenosine
  modified_base 17: mod_base = um
  modified_base 18: mod_base = OTHER; note = 2-prime-fluoroadenosine
  modified_base 19: mod_base = gm
  modified_base 20: mod_base = OTHER; note = 2-prime-fluoroadenosine
  source 1..20: mol_type = other RNA
ttactttacacgggcataga

SEQ ID NO: 353 - RNA, 20 nt, synthetic construct
  misc_feature 1..20: note = Description of Artificial Sequence: Synthetic oligonucleotide
  modified_base 1: mod_base = um
  modified_base 1..3: mod_base = OTHER; note = Phosphorothioate internucleotide linkage
  modified_base 2: mod_base = OTHER; note = 2-prime-fluoroguanosine
  modified_base 3: mod_base = cm
  modified_base 4: mod_base = OTHER; note = 2-prime-fluoroadenosine
  modified_base 5: mod_base = cm
  modified_base 6: mod_base = OTHER; note = 2-prime-fluorouridine
  modified_base 7: mod_base = cm
  modified_base 8: mod_base = OTHER; note = 2-prime-fluorouridine
  modified_base 9: mod_base = cm
  modified_base 10: mod_base = OTHER; note = 2-prime-fluorocytidine
  modified_base 11: mod_base = um
  modified_base 12: mod_base = OTHER; note = 2-prime-fluoroguanosine
  modified_base 13: mod_base = OTHER; note = 2-prime-O-methyladenosine
  modified_base 13..20: mod_base = OTHER; note = Phosphorothioate internucleotide linkage
  modified_base 14: mod_base = OTHER; note = 2-prime-fluorocytidine
  modified_base 15: mod_base = um
  modified_base 16: mod_base = OTHER; note = 2-prime-fluoroadenosine
  modified_base 17: mod_base = OTHER; note = 2-prime-O-methyladenosine
  modified_base 18: mod_base = OTHER; note = 2-prime-fluoroadenosine
  modified_base 19: mod_base = OTHER; note = 2-prime-O-methyladenosine
  modified_base 20: mod_base = OTHER; note = 2-prime-fluoroguanosine
  source 1..20: mol_type = other RNA
tgcactctcctgactaaaag

SEQ ID NO: 354 - RNA, 20 nt, synthetic construct
  misc_feature 1..20: note = Description of Artificial Sequence: Synthetic oligonucleotide
  modified_base 1: mod_base = um
  modified_base 1..3: mod_base = OTHER; note = Phosphorothioate internucleotide linkage
  modified_base 2: mod_base = OTHER; note = 2-prime-fluoroadenosine
  modified_base 3: mod_base = cm
  modified_base 4: mod_base = OTHER; note = 2-prime-fluoroadenosine
  modified_base 5: mod_base = um
  modified_base 6: mod_base = OTHER; note = 2-prime-fluorouridine
  modified_base 7: mod_base = cm
  modified_base 8: mod_base = OTHER; note = 2-prime-fluoroadenosine
  modified_base 9: mod_base = OTHER; note = 2-prime-O-methyladenosine
  modified_base 10: mod_base = OTHER; note = 2-prime-fluorouridine
  modified_base 11: mod_base = OTHER; note = 2-prime-O-methyladenosine
  modified_base 12: mod_base = OTHER; note = 2-prime-fluorocytidine
  modified_base 13: mod_base = cm
  modified_base 13..20: mod_base = OTHER; note = Phosphorothioate internucleotide linkage
  modified_base 14: mod_base = OTHER; note = 2-prime-fluorocytidine
  modified_base 15: mod_base = OTHER; note = 2-prime-O-methyladenosine
  modified_base 16: mod_base = OTHER; note = 2-prime-fluoroadenosine
  modified_base 17: mod_base = OTHER; note = 2-prime-O-methyladenosine
  modified_base 18: mod_base = OTHER; note = 2-prime-fluoroadenosine
  modified_base 19: mod_base = cm
  modified_base 20: mod_base = OTHER; note = 2-prime-fluoroadenosine
  source 1..20: mol_type = other RNA
tacattcaatacccaaaaca

SEQ ID NO: 355 - RNA, 20 nt, synthetic construct
  misc_feature 1..20: note = Description of Artificial Sequence: Synthetic oligonucleotide
  modified_base 1: mod_base = um
  modified_base 1..3: mod_base = OTHER; note = Phosphorothioate internucleotide linkage
  modified_base 2: mod_base = OTHER; note = 2-prime-fluorouridine
  modified_base 3: mod_base = cm
  modified_base 4: mod_base = OTHER; note = 2-prime-fluorocytidine
  modified_base 5: mod_base = um
  modified_base 6: mod_base = OTHER; note = 2-prime-fluorocytidine
  modified_base 7: mod_base = cm
  modified_base 8: mod_base = OTHER; note = 2-prime-fluoroadenosine
  modified_base 9: mod_base = cm
  modified_base 10: mod_base = OTHER; note = 2-prime-fluorouridine
  modified_base 11: mod_base = um
  modified_base 12: mod_base = OTHER; note = 2-prime-fluoroadenosine
  modified_base 13: mod_base = cm
  modified_base 13..20: mod_base = OTHER; note = Phosphorothioate internucleotide linkage
  modified_base 14: mod_base = OTHER; note = 2-prime-fluorocytidine
  modified_base 15: mod_base = OTHER; note = 2-prime-O-methyladenosine
  modified_base 16: mod_base = OTHER; note = 2-prime-fluorocytidine
  modified_base 17: mod_base = OTHER; note = 2-prime-O-methyladenosine
  modified_base 18: mod_base = OTHER; note = 2-prime-fluorouridine
  modified_base 19: mod_base = um
  modified_base 20: mod_base = OTHER; note = 2-prime-fluorocytidine
  source 1..20: mol_type = other RNA
ttcctccacttaccacattc

SEQ ID NO: 356 - RNA, 20 nt, synthetic construct
  misc_feature 1..20: note = Description of Artificial Sequence: Synthetic oligonucleotide
  modified_base 1: mod_base = um
  modified_base 1..3: mod_base = OTHER; note = Phosphorothioate internucleotide linkage
  modified_base 2: mod_base = OTHER; note = 2-prime-fluoroadenosine
  modified_base 3: mod_base = cm
  modified_base 4: mod_base = OTHER; note = 2-prime-fluoroadenosine
  modified_base 5: mod_base = um
  modified_base 6: mod_base = OTHER; note = 2-prime-fluorouridine
  modified_base 7: mod_base = um
  modified_base 8: mod_base = OTHER; note = 2-prime-fluorocytidine
  modified_base 9: mod_base = cm
  modified_base 10: mod_base = OTHER; note = 2-prime-fluorouridine
  modified_base 11: mod_base = cm
  modified_base 12: mod_base = OTHER; note = 2-prime-fluorocytidine
  modified_base 13: mod_base = OTHER; note = 2-prime-O-methyladenosine
  modified_base 13..20: mod_base = OTHER; note = Phosphorothioate internucleotide linkage
  modified_base 14: mod_base = OTHER; note = 2-prime-fluorocytidine
  modified_base 15: mod_base = um
  modified_base 16: mod_base = OTHER; note = 2-prime-fluorouridine
  modified_base 17: mod_base = OTHER; note = 2-prime-O-methyladenosine
  modified_base 18: mod_base = OTHER; note = 2-prime-fluorocytidine
  modified_base 19: mod_base = cm
  modified_base 20: mod_base = OTHER; note = 2-prime-fluoroadenosine
  source 1..20: mol_type = other RNA
tacatttcctccacttacca

SEQ ID NO: 357 - RNA, 20 nt, synthetic construct
  misc_feature 1..20: note = Description of Artificial Sequence: Synthetic oligonucleotide
  modified_base 1: mod_base = um
  modified_base 1..3: mod_base = OTHER; note = Phosphorothioate internucleotide linkage
  modified_base 2: mod_base = OTHER; note = 2-prime-fluoroguanosine
  modified_base 3: mod_base = cm
  modified_base 4: mod_base = OTHER; note = 2-prime-fluoroadenosine
  modified_base 5: mod_base = cm
  modified_base 6: mod_base = OTHER; note = 2-prime-fluoroadenosine
  modified_base 7: mod_base = gm
  modified_base 8: mod_base = OTHER; note = 2-prime-fluoroadenosine
  modified_base 9: mod_base = gm
  modified_base 10: mod_base = OTHER; note = 2-prime-fluorouridine
  modified_base 11: mod_base = um
  modified_base 12: mod_base = OTHER; note = 2-prime-fluorocytidine
  modified_base 13: mod_base = cm
  modified_base 13..20: mod_base = OTHER; note = Phosphorothioate internucleotide linkage
  modified_base 14: mod_base = OTHER; note = 2-prime-fluoroadenosine
  modified_base 15: mod_base = OTHER; note = 2-prime-O-methyladenosine
  modified_base 16: mod_base = OTHER; note = 2-prime-fluorocytidine
  modified_base 17: mod_base = OTHER; note = 2-prime-O-methyladenosine
  modified_base 18: mod_base = OTHER; note = 2-prime-fluorouridine
  modified_base 19: mod_base = um
  modified_base 20: mod_base = OTHER; note = 2-prime-fluorouridine
  source 1..20: mol_type = other RNA
tgcacagagttccaacattt

SEQ ID NO: 358 - RNA, 20 nt, synthetic construct
  misc_feature 1..20: note = Description of Artificial Sequence: Synthetic oligonucleotide
  modified_base 1: mod_base = um
  modified_base 1..3: mod_base = OTHER; note = Phosphorothioate internucleotide linkage
  modified_base 2: mod_base = OTHER; note = 2-prime-fluorouridine
  modified_base 3: mod_base = OTHER; note = 2-prime-O-methyladenosine
  modified_base 4: mod_base = OTHER; note = 2-prime-fluoroadenosine
  modified_base 5: mod_base = gm
  modified_base 6: mod_base = OTHER; note = 2-prime-fluoroguanosine
  modified_base 7: mod_base = gm
  modified_base 8: mod_base = OTHER; note = 2-prime-fluorocytidine
  modified_base 9: mod_base = cm
  modified_base 10: mod_base = OTHER; note = 2-prime-fluorouridine
  modified_base 11: mod_base = cm
  modified_base 12: mod_base = OTHER; note = 2-prime-fluorocytidine
  modified_base 13: mod_base = um
  modified_base 13..20: mod_base = OTHER; note = Phosphorothioate internucleotide linkage
  modified_base 14: mod_base = OTHER; note = 2-prime-fluorocytidine
  modified_base 15: mod_base = OTHER; note = 2-prime-O-methyladenosine
  modified_base 16: mod_base = OTHER; note = 2-prime-fluoroadenosine
  modified_base 17: mod_base = OTHER; note = 2-prime-O-methyladenosine
  modified_base 18: mod_base = OTHER; note = 2-prime-fluorocytidine
  modified_base 19: mod_base = OTHER; note = 2-prime-O-methyladenosine
  modified_base 20: mod_base = OTHER; note = 2-prime-fluorouridine
  source 1..20: mol_type = other RNA
ttaagggcctcctcaaacat

SEQ ID NO: 359 - RNA, 20 nt, synthetic construct
  misc_feature 1..20: note = Description of Artificial Sequence: Synthetic oligonucleotide
  modified_base 1: mod_base = um
  modified_base 1..3: mod_base = OTHER; note = Phosphorothioate internucleotide linkage
  modified_base 2: mod_base = OTHER; note = 2-prime-fluorouridine
  modified_base 3: mod_base = cm
  modified_base 4: mod_base = OTHER; note = 2-prime-fluoroadenosine
  modified_base 5: mod_base = gm
  modified_base 6: mod_base = OTHER; note = 2-prime-fluorouridine
  modified_base 7: mod_base = OTHER; note = 2-prime-O-methyladenosine
  modified_base 8: mod_base = OTHER; note = 2-prime-fluoroguanosine
  modified_base 9: mod_base = cm
  modified_base 10: mod_base = OTHER; note = 2-prime-fluorouridine
  modified_base 11: mod_base = um
  modified_base 12: mod_base = OTHER; note = 2-prime-fluorocytidine
  modified_base 13: mod_base = cm
  modified_base 13..20: mod_base = OTHER; note = Phosphorothioate internucleotide linkage
  modified_base 14: mod_base = OTHER; note = 2-prime-fluorocytidine
  modified_base 15: mod_base = um
  modified_base 16: mod_base = OTHER; note = 2-prime-fluorouridine
  modified_base 17: mod_base = OTHER; note = 2-prime-O-methyladenosine
  modified_base 18: mod_base = OTHER; note = 2-prime-fluoroadenosine
  modified_base 19: mod_base = gm
  modified_base 20: mod_base = OTHER; note = 2-prime-fluoroguanosine
  source 1..20: mol_type = other RNA
ttcagtagcttcccttaagg

SEQ ID NO: 360 - RNA, 20 nt, synthetic construct
  misc_feature 1..20: note = Description of Artificial Sequence: Synthetic oligonucleotide
  modified_base 1: mod_base = um
  modified_base 1..3: mod_base = OTHER; note = Phosphorothioate internucleotide linkage
  modified_base 2: mod_base = OTHER; note = 2-prime-fluorouridine
  modified_base 3: mod_base = um
  modified_base 4: mod_base = OTHER; note = 2-prime-fluorocytidine
  modified_base 5: mod_base = um
  modified_base 6: mod_base = OTHER; note = 2-prime-fluorouridine
  modified_base 7: mod_base = OTHER; note = 2-prime-O-methyladenosine
  modified_base 8: mod_base = OTHER; note = 2-prime-fluorocytidine
  modified_base 9: mod_base = gm
  modified_base 10: mod_base = OTHER; note = 2-prime-fluorouridine
  modified_base 11: mod_base = gm
  modified_base 12: mod_base = OTHER; note = 2-prime-fluorouridine
  modified_base 13: mod_base = um
  modified_base 13..20: mod_base = OTHER; note = Phosphorothioate internucleotide linkage
  modified_base 14: mod_base = OTHER; note = 2-prime-fluoroadenosine
  modified_base 15: mod_base = um
  modified_base 16: mod_base = OTHER; note = 2-prime-fluoroadenosine
  modified_base 17: mod_base = OTHER; note = 2-prime-O-methyladenosine
  modified_base 18: mod_base = OTHER; note = 2-prime-fluorouridine
  modified_base 19: mod_base = um
  modified_base 20: mod_base = OTHER; note = 2-prime-fluorocytidine
  source 1..20: mol_type = other RNA
tttcttacgtgttataattc

SEQ ID NO: 361 - RNA, 20 nt, synthetic construct
  misc_feature 1..20: note = Description of Artificial Sequence: Synthetic oligonucleotide
  modified_base 1: mod_base = um
  modified_base 1..3: mod_base = OTHER; note = Phosphorothioate internucleotide linkage
  modified_base 2: mod_base = OTHER; note = 2-prime-fluorouridine
  modified_base 3: mod_base = um
  modified_base 4: mod_base = OTHER; note = 2-prime-fluorocytidine
  modified_base 5: mod_base = um
  modified_base 6: mod_base = OTHER; note = 2-prime-fluorouridine
  modified_base 7: mod_base = OTHER; note = 2-prime-O-methyladenosine
  modified_base 8: mod_base = OTHER; note = 2-prime-fluorocytidine
  modified_base 9: mod_base = OTHER; note = 2-prime-O-methyladenosine
  modified_base 10: mod_base = OTHER; note = 2-prime-fluoroadenosine
  modified_base 11: mod_base = OTHER; note = 2-prime-O-methyladenosine
  modified_base 12: mod_base = OTHER; note = 2-prime-fluorouridine
  modified_base 13: mod_base = gm
  modified_base 13..20: mod_base = OTHER; note = Phosphorothioate internucleotide linkage
  modified_base 14: mod_base = OTHER; note = 2-prime-fluorouridine
  modified_base 15: mod_base = OTHER; note = 2-prime-O-methyladenosine
  modified_base 16: mod_base = OTHER; note = 2-prime-fluoroadenosine
  modified_base 17: mod_base = OTHER; note = 2-prime-O-methyladenosine
  modified_base 18: mod_base = OTHER; note = 2-prime-fluorocytidine
  modified_base 19: mod_base = OTHER; note = 2-prime-O-methyladenosine
  modified_base 20: mod_base = OTHER; note = 2-prime-fluorouridine
  source 1..20: mol_type = other RNA
tttcttacaaatgtaaacat

SEQ ID NO: 362 - RNA, 20 nt, synthetic construct
  misc_feature 1..20: note = Description of Artificial Sequence: Synthetic oligonucleotide
  modified_base 1: mod_base = um
  modified_base 1..3: mod_base = OTHER; note = Phosphorothioate internucleotide linkage
  modified_base 2: mod_base = OTHER; note = 2-prime-fluoroguanosine
  modified_base 3: mod_base = um
  modified_base 4: mod_base = OTHER; note = 2-prime-fluoroguanosine
  modified_base 5: mod_base = um
  modified_base 6: mod_base = OTHER; note = 2-prime-fluorouridine
  modified_base 7: mod_base = OTHER; note = 2-prime-O-methyladenosine
  modified_base 8: mod_base = OTHER; note = 2-prime-fluorouridine
  modified_base 9: mod_base = um
  modified_base 10: mod_base = OTHER; note = 2-prime-fluorouridine
  modified_base 11: mod_base = cm
  modified_base 12: mod_base = OTHER; note = 2-prime-fluorouridine
  modified_base 13: mod_base = um
  modified_base 13..20: mod_base = OTHER; note = Phosphorothioate internucleotide linkage
  modified_base 14: mod_base = OTHER; note = 2-prime-fluoroadenosine
  modified_base 15: mod_base = cm
  modified_base 16: mod_base = OTHER; note = 2-prime-fluoroadenosine
  modified_base 17: mod_base = OTHER; note = 2-prime-O-methyladenosine
  modified_base 18: mod_base = OTHER; note = 2-prime-fluoroadenosine
  modified_base 19: mod_base = um
  modified_base 20: mod_base = OTHER; note = 2-prime-fluoroguanosine
  source 1..20: mol_type = other RNA
tgtgttatttcttacaaatg

SEQ ID NO: 363 - RNA, 20 nt, synthetic construct
  misc_feature 1..20: note = Description of Artificial Sequence: Synthetic oligonucleotide
  modified_base 1: mod_base = um
  modified_base 1..3: mod_base = OTHER; note = Phosphorothioate internucleotide linkage
  modified_base 2: mod_base = OTHER; note = 2-prime-fluorouridine
  modified_base 3: mod_base = um
  modified_base 4: mod_base = OTHER; note = 2-prime-fluoroadenosine
  modified_base 5: mod_base = cm
  modified_base 6: mod_base = OTHER; note = 2-prime-fluoroadenosine
  modified_base 7: mod_base = um
  modified_base 8: mod_base = OTHER; note = 2-prime-fluorouridine
  modified_base 9: mod_base = cm
  modified_base 10: mod_base = OTHER; note = 2-prime-fluoroadenosine
  modified_base 11: mod_base = cm
  modified_base 12: mod_base = OTHER; note = 2-prime-fluoroadenosine
  modified_base 13: mod_base = gm
  modified_base 13..20: mod_base = OTHER; note = Phosphorothioate internucleotide linkage
  modified_base 14: mod_base = OTHER; note = 2-prime-fluorouridine
  modified_base 15: mod_base = gm
  modified_base 16: mod_base = OTHER; note = 2-prime-fluorouridine
  modified_base 17: mod_base = um
  modified_base 18: mod_base = OTHER; note = 2-prime-fluoroadenosine
  modified_base 19: mod_base = um
  modified_base 20: mod_base = OTHER; note = 2-prime-fluorouridine
  source 1..20: mol_type = other RNA
tttacattcacagtgttatt

SEQ ID NO: 364 - RNA, 20 nt, synthetic construct
  misc_feature 1..20: note = Description of Artificial Sequence: Synthetic oligonucleotide
  modified_base 1: mod_base = um
  modified_base 1..3: mod_base = OTHER; note = Phosphorothioate internucleotide linkage
  modified_base 2: mod_base = OTHER; note = 2-prime-fluorouridine
  modified_base 3: mod_base = um
  modified_base 4: mod_base = OTHER; note = 2-prime-fluoroadenosine
  modified_base 5: mod_base = cm
  modified_base 6: mod_base = OTHER; note = 2-prime-fluorouridine
  modified_base 7: mod_base = OTHER; note = 2-prime-O-methyladenosine
  modified_base 8: mod_base = OTHER; note = 2-prime-fluoroadenosine
  modified_base 9: mod_base = um
  modified_base 10: mod_base = OTHER; note = 2-prime-fluoroguanosine
  modified_base 11: mod_base = OTHER; note = 2-prime-O-methyladenosine
  modified_base 12: mod_base = OTHER; note = 2-prime-fluoroguanosine
  modified_base 13: mod_base = cm
  modified_base 13..20: mod_base = OTHER; note = Phosphorothioate internucleotide linkage
  modified_base 14: mod_base = OTHER; note = 2-prime-fluorouridine
  modified_base 15: mod_base = cm
  modified_base 16: mod_base = OTHER; note = 2-prime-fluoroadenosine
  modified_base 17: mod_base = um
  modified_base 18: mod_base = OTHER; note = 2-prime-fluoroadenosine
  modified_base 19: mod_base = um
  modified_base 20: mod_base = OTHER; note = 2-prime-fluorouridine
  source 1..20: mol_type = other RNA
tttactaatgagctcatatt

SEQ ID NO: 365 - RNA, 20 nt, synthetic construct
  misc_feature 1..20: note = Description of Artificial Sequence: Synthetic oligonucleotide
  modified_base 1: mod_base = um
  modified_base 1..3: mod_base = OTHER; note = Phosphorothioate internucleotide linkage
  modified_base 2: mod_base = OTHER; note = 2-prime-fluorouridine
  modified_base 3: mod_base = OTHER; note = 2-prime-O-methyladenosine
  modified_base 4: mod_base = OTHER; note = 2-prime-fluorouridine
  modified_base 5: mod_base = gm
  modified_base 6: mod_base = OTHER; note = 2-prime-fluorouridine
  modified_base 7: mod_base = OTHER; note = 2-prime-O-methyladenosine
  modified_base 8: mod_base = OTHER; note = 2-prime-fluorouridine
  modified_base 9: mod_base = OTHER; note = 2-prime-O-methyladenosine
  modified_base 10: mod_base = OTHER; note = 2-prime-fluorouridine
  modified_base 11: mod_base = gm
  modified_base 12: mod_base = OTHER; note = 2-prime-fluorocytidine
  modified_base 13: mod_base = gm
  modified_base 13..20: mod_base = OTHER; note = Phosphorothioate internucleotide linkage
  modified_base 14: mod_base = OTHER; note = 2-prime-fluorouridine
  modified_base 15: mod_base = gm
  modified_base 16: mod_base = OTHER; note = 2-prime-fluoroguanosine
  modified_base 17: mod_base = gm
  modified_base 18: mod_base = OTHER; note = 2-prime-fluorouridine
  modified_base 19: mod_base = gm
  modified_base 20: mod_base = OTHER; note = 2-prime-fluoroadenosine
  source 1..20: mol_type = other RNA
ttatgtatatgcgtgggtga

SEQ ID NO: 366 - RNA, 20 nt, synthetic construct
  misc_feature 1..20: note = Description of Artificial Sequence: Synthetic oligonucleotide
  modified_base 1: mod_base = um
  modified_base 1..3: mod_base = OTHER; note = Phosphorothioate internucleotide linkage
  modified_base 2: mod_base = OTHER; note = 2-prime-fluoroadenosine
  modified_base 3: mod_base = um
  modified_base 4: mod_base = OTHER; note = 2-prime-fluorouridine
  modified_base 5: mod_base = OTHER; note = 2-prime-O-methyladenosine
  modified_base 6: mod_base = OTHER; note = 2-prime-fluorouridine
  modified_base 7: mod_base = OTHER; note = 2-prime-O-methyladenosine
  modified_base 8: mod_base = OTHER; note = 2-prime-fluoroguanosine
  modified_base 9: mod_base = OTHER; note = 2-prime-O-methyladenosine
  modified_base 10: mod_base = OTHER; note = 2-prime-fluorouridine
  modified_base 11: mod_base = gm
  modified_base 12: mod_base = OTHER; note = 2-prime-fluorouridine
  modified_base 13: mod_base = gm
  modified_base 13..20: mod_base = OTHER; note = Phosphorothioate internucleotide linkage
  modified_base 14: mod_base = OTHER; note = 2-prime-fluorouridine
  modified_base 15: mod_base = cm
  modified_base 16: mod_base = OTHER; note = 2-prime-fluorouridine
  modified_base 17: mod_base = OTHER; note = 2-prime-O-methyladenosine
  modified_base 18: mod_base = OTHER; note = 2-prime-fluorouridine
  modified_base 19: mod_base = OTHER; note = 2-prime-O-methyladenosine
  modified_base 20: mod_base = OTHER; note = 2-prime-fluorouridine
  source 1..20: mol_type = other RNA
tattatagatgtgtctatat

SEQ ID NO: 367 - RNA, 20 nt, synthetic construct
  misc_feature 1..20: note = Description of Artificial Sequence: Synthetic oligonucleotide
  modified_base 1: mod_base = um
  modified_base 1..3: mod_base = OTHER; note = Phosphorothioate internucleotide linkage
  modified_base 2: mod_base = OTHER; note = 2-prime-fluorouridine
  modified_base 3: mod_base = um
  modified_base 4: mod_base = OTHER; note = 2-prime-fluoroguanosine
  modified_base 5: mod_base = OTHER; note = 2-prime-O-methyladenosine
  modified_base 6: mod_base = OTHER; note = 2-prime-fluoroguanosine
  modified_base 7: mod_base = OTHER; note = 2-prime-O-methyladenosine
  modified_base 8: mod_base = OTHER; note = 2-prime-fluoroguanosine
  modified_base 9: mod_base = gm
  modified_base 10: mod_base = OTHER; note = 2-prime-fluorouridine
  modified_base 11: mod_base = gm
  modified_base 12: mod_base = OTHER; note = 2-prime-fluorouridine
  modified_base 13: mod_base = gm
  modified_base 13..20: mod_base = OTHER; note = Phosphorothioate internucleotide linkage
  modified_base 14: mod_base = OTHER; note = 2-prime-fluorouridine
  modified_base 15: mod_base = gm
  modified_base 16: mod_base = OTHER; note = 2-prime-fluorouridine
  modified_base 17: mod_base = gm
  modified_base 18: mod_base = OTHER; note = 2-prime-fluorouridine
  modified_base 19: mod_base = OTHER; note = 2-prime-O-methyladenosine
  modified_base 20: mod_base = OTHER; note = 2-prime-fluoroadenosine
  source 1..20: mol_type = other RNA
tttgagaggtgtgtgtgtaa

SEQ ID NO: 368 - RNA, 20 nt, synthetic construct
  misc_feature 1..20: note = Description of Artificial Sequence: Synthetic oligonucleotide
  modified_base 1: mod_base = um
  modified_base 1..3: mod_base = OTHER; note = Phosphorothioate internucleotide linkage
  modified_base 2: mod_base = OTHER; note = 2-prime-fluorouridine
  modified_base 3: mod_base = um
  modified_base 4: mod_base = OTHER; note = 2-prime-fluoroadenosine
  modified_base 5: mod_base = gm
  modified_base 6: mod_base = OTHER; note = 2-prime-fluoroguanosine
  modified_base 7: mod_base = OTHER; note = 2-prime-O-methyladenosine
  modified_base 8: mod_base = OTHER; note = 2-prime-fluoroadenosine
  modified_base 9: mod_base = cm
  modified_base 10: mod_base = OTHER; note = 2-prime-fluoroadenosine
  modified_base 11: mod_base = um
  modified_base 12: mod_base = OTHER; note = 2-prime-fluoroguanosine
  modified_base 13: mod_base = OTHER; note = 2-prime-O-methyladenosine
  modified_base 13..20: mod_base = OTHER; note = Phosphorothioate internucleotide linkage
  modified_base 14: mod_base = OTHER; note = 2-prime-fluorouridine
  modified_base 15: mod_base = OTHER; note = 2-prime-O-methyladenosine
  modified_base 16: mod_base = OTHER; note = 2-prime-fluoroadenosine
  modified_base 17: mod_base = OTHER; note = 2-prime-O-methyladenosine
  modified_base 18: mod_base = OTHER; note = 2-prime-fluoroguanosine
  modified_base 19: mod_base = um
  modified_base 20: mod_base = OTHER; note = 2-prime-fluorocytidine
  source 1..20: mol_type = other RNA
tttaggaacatgataaagtc

SEQ ID NO: 369 - RNA, 20 nt, synthetic construct
  misc_feature 1..20: note = Description of Artificial Sequence: Synthetic oligonucleotide
  modified_base 1: mod_base = um
  modified_base 1..3: mod_base = OTHER; note = Phosphorothioate internucleotide linkage
  modified_base 2: mod_base = OTHER; note = 2-prime-fluorouridine
  modified_base 3: mod_base = um
  modified_base 4: mod_base = OTHER; note = 2-prime-fluoroadenosine
  modified_base 5: mod_base = OTHER; note = 2-prime-O-methyladenosine
  modified_base 6: mod_base = OTHER; note = 2-prime-fluorouridine
  modified_base 7: mod_base = cm
  modified_base 8: mod_base = OTHER; note = 2-prime-fluoroadenosine
  modified_base 9: mod_base = cm
  modified_base 10: mod_base = OTHER; note = 2-prime-fluoroadenosine
  modified_base 11: mod_base = um
  modified_base 12: mod_base = OTHER; note = 2-prime-fluorouridine
  modified_base 13: mod_base = um
  modified_base 13..20: mod_base = OTHER; note = Phosphorothioate internucleotide linkage
  modified_base 14: mod_base = OTHER; note = 2-prime-fluoroguanosine
  modified_base 15: mod_base = cm
  modified_base 16: mod_base = OTHER; note = 2-prime-fluoroadenosine
  modified_base 16: mod_base = OTHER; note = 2-prime-fluoroguanosine
  modified_base 17: mod_base = OTHER; note = 2-prime-O-methyladenosine
  modified_base 19: mod_base = OTHER; note = 2-prime-O-methyladenosine
  modified_base 20: mod_base = OTHER; note = 2-prime-fluoroadenosine
  source 1..20: mol_type = other RNA
tttaatcacatttgcaacaa

SEQ ID NO: 370 - RNA, 20 nt, synthetic construct
  misc_feature 1..20: note = Description of Artificial Sequence: Synthetic oligonucleotide
  modified_base 1..3: mod_base = OTHER; note = Phosphorothioate internucleotide linkage
  modified_base 1: mod_base = um
  modified_base 2: mod_base = OTHER; note = 2-prime-fluorocytidine
  modified_base 3: mod_base = cm
  modified_base 4: mod_base = OTHER; note = 2-prime-fluoroadenosine
  modified_base 5: mod_base = OTHER; note = 2-prime-O-methyladenosine
  modified_base 6: mod_base = OTHER; note = 2-prime-fluoroadenosine
  modified_base 7: mod_base = um
  modified_base 8: mod_base = OTHER; note = 2-prime-fluorouridine
  modified_base 9: mod_base = OTHER; note = 2-prime-O-methyladenosine
  modified_base 10: mod_base = OTHER; note = 2-prime-fluoroadenosine
  modified_base 11: mod_base = um
  modified_base 12: mod_base = OTHER; note = 2-prime-fluorocytidine
  modified_base 13..20: mod_base = OTHER; note = Phosphorothioate internucleotide linkage
  modified_base 13: mod_base = OTHER; note = 2-prime-O-methyladenosine
  modified_base 14: mod_base = OTHER; note = 2-prime-fluorocytidine
  modified_base 15: mod_base = OTHER; note = 2-prime-O-methyladenosine
  modified_base 16: mod_base = OTHER; note = 2-prime-fluorouridine
  modified_base 17: mod_base = um
  modified_base 18: mod_base = OTHER; note = 2-prime-fluorouridine
  modified_base 19: mod_base = gm
  modified_base 20: mod_base = OTHER; note = 2-prime-fluorocytidine
  source 1..20: mol_type = other RNA
tccaaattaatcacatttgc

SEQ ID NO: 371 - RNA, 20 nt, synthetic construct
  misc_feature 1..20: note = Description of Artificial Sequence: Synthetic oligonucleotide
  modified_base 1: mod_base = um
  modified_base 1..3: mod_base = OTHER; note = Phosphorothioate internucleotide linkage
  modified_base 2: mod_base = OTHER; note = 2-prime-fluoroadenosine
  modified_base 3: mod_base = OTHER; note = 2-prime-O-methyladenosine
  modified_base 4: mod_base = OTHER; note = 2-prime-fluoroadenosine
  modified_base 5: mod_base = OTHER; note = 2-prime-O-methyladenosine
  modified_base 6: mod_base = OTHER; note = 2-prime-fluorocytidine
  modified_base 7: mod_base = um
  modified_base 8: mod_base = OTHER; note = 2-prime-fluorouridine
  modified_base 9: mod_base = gm
  modified_base 10: mod_base = OTHER; note = 2-prime-fluoroadenosine
  modified_base 11: mod_base = cm
  modified_base 12: mod_base = OTHER; note = 2-prime-fluoroadenosine
  modified_base 13: mod_base = OTHER; note = 2-prime-O-methyladenosine
  modified_base 13..20: mod_base = OTHER; note = Phosphorothioate internucleotide linkage
  modified_base 14: mod_base = OTHER; note = 2-prime-fluorocytidine
  modified_base 15: mod_base = cm
  modified_base 16: mod_base = OTHER; note = 2-prime-fluoroadenosine
  modified_base 17: mod_base = OTHER; note = 2-prime-O-methyladenosine
  modified_base 18: mod_base = OTHER; note = 2-prime-fluoroadenosine
  modified_base 19: mod_base = um
  modified_base 20: mod_base = OTHER; note = 2-prime-fluorouridine
  source 1..20: mol_type = other RNA
taaaacttgacaaccaaatt

SEQ ID NO: 372 - RNA, 20 nt, synthetic construct
  misc_feature 1..20: note = Description of Artificial Sequence: Synthetic oligonucleotide
  modified_base 1: mod_base = um
  modified_base 1..3: mod_base = OTHER; note = Phosphorothioate internucleotide linkage
  modified_base 2: mod_base = OTHER; note = 2-prime-fluorouridine
  modified_base 3: mod_base = um
  modified_base 4: mod_base = OTHER; note = 2-prime-fluoroadenosine
  modified_base 5: mod_base = cm
  modified_base 6: mod_base = OTHER; note = 2-prime-fluorocytidine
  modified_base 7: mod_base = OTHER; note = 2-prime-O-methyladenosine
  modified_base 8: mod_base = OTHER; note = 2-prime-fluoroguanosine
  modified_base 9: mod_base = cm
  modified_base 10: mod_base = OTHER; note = 2-prime-fluoroadenosine
  modified_base 11: mod_base = gm
  modified_base 12: mod_base = OTHER; note = 2-prime-fluoroguanosine
  modified_base 13: mod_base = OTHER; note = 2-prime-O-methyladenosine
  modified_base 13..20: mod_base = OTHER; note = Phosphorothioate internucleotide linkage
  modified_base 14: mod_base = OTHER; note = 2-prime-fluoroadenosine
  modified_base 15: mod_base = OTHER; note = 2-prime-O-methyladenosine
  modified_base 16: mod_base = OTHER; note = 2-prime-fluoroadenosine
  modified_base 17: mod_base = cm
  modified_base 18: mod_base = OTHER; note = 2-prime-fluoroadenosine
  modified_base 19: mod_base = OTHER; note = 2-prime-O-methyladenosine
  modified_base 20: mod_base = OTHER; note = 2-prime-fluoroadenosine
  source 1..20: mol_type = other RNA
tttaccagcaggaaaacaaa

SEQ ID NO: 373 - RNA, 20 nt, synthetic construct
  misc_feature 1..20: note = Description of Artificial Sequence: Synthetic oligonucleotide
  modified_base 1: mod_base = um
  modified_base 1..3: mod_base = OTHER; note = Phosphorothioate internucleotide linkage
  modified_base 2: mod_base = OTHER; note = 2-prime-fluoroadenosine
  modified_base 3: mod_base = um
  modified_base 4: mod_base = OTHER; note = 2-prime-fluoroadenosine
  modified_base 5: mod_base = um
  modified_base 6: mod_base = OTHER; note = 2-prime-fluorouridine
  modified_base 7: mod_base = OTHER; note = 2-prime-O-methyladenosine
  modified_base 8: mod_base = OTHER; note = 2-prime-fluorocytidine
  modified_base 9: mod_base = cm
  modified_base 10: mod_base = OTHER; note = 2-prime-fluoroadenosine
  modified_base 11: mod_base = gm
  modified_base 12: mod_base = OTHER; note = 2-prime-fluorocytidine
  modified_base 13: mod_base = OTHER; note = 2-prime-O-methyladenosine
  modified_base 13..20: mod_base = OTHER; note = Phosphorothioate internucleotide linkage
  modified_base 14: mod_base = OTHER; note = 2-prime-fluoroguanosine
  modified_base 15: mod_base = gm
  modified_base 16: mod_base = OTHER; note = 2-prime-fluoroadenosine
  modified_base 17: mod_base = OTHER; note = 2-prime-O-methyladenosine
  modified_base 18: mod_base = OTHER; note = 2-prime-fluoroadenosine
  modified_base 19: mod_base = OTHER; note = 2-prime-O-methyladenosine
  modified_base 20: mod_base = OTHER; note = 2-prime-fluorocytidine
  source 1..20: mol_type = other RNA
tatattaccagcaggaaaac

SEQ ID NO: 374 - RNA, 20 nt, synthetic construct
  misc_feature 1..20: note = Description of Artificial Sequence: Synthetic oligonucleotide
  modified_base 1: mod_base = um
  modified_base 1..3: mod_base = OTHER; note = Phosphorothioate internucleotide linkage
  modified_base 2: mod_base = OTHER; note = 2-prime-fluorouridine
  modified_base 3: mod_base = um
  modified_base 4: mod_base = OTHER; note = 2-prime-fluoroadenosine
  modified_base 5: mod_base = OTHER; note = 2-prime-O-methyladenosine
  modified_base 6: mod_base = OTHER; note = 2-prime-fluoroadenosine
  modified_base 7: mod_base = OTHER; note = 2-prime-O-methyladenosine
  modified_base 8: mod_base = OTHER; note = 2-prime-fluorouridine
  modified_base 9: mod_base = cm
  modified_base 10: mod_base = OTHER; note = 2-prime-fluorouridine
  modified_base 11: mod_base = um
  modified_base 12: mod_base = OTHER; note = 2-prime-fluorouridine
  modified_base 13: mod_base = cm
  modified_base 13..20: mod_base = OTHER; note = Phosphorothioate internucleotide linkage
  modified_base 14: mod_base = OTHER; note = 2-prime-fluorocytidine
  modified_base 15: mod_base = cm
  modified_base 16: mod_base = OTHER; note = 2-prime-fluoroguanosine
  modified_base 17: mod_base = OTHER; note = 2-prime-O-methyladenosine
  modified_base 18: mod_base = OTHER; note = 2-prime-fluorouridine
  modified_base 19: mod_base = OTHER; note = 2-prime-O-methyladenosine
  modified_base 20: mod_base = OTHER; note = 2-prime-fluorouridine
  source 1..20: mol_type = other RNA
tttaaaatctttcccgatat

SEQ ID NO: 375 - RNA, 20 nt, synthetic construct
  misc_feature 1..20: note = Description of Artificial Sequence: Synthetic oligonucleotide
  modified_base 1: mod_base = um
  modified_base 1..3: mod_base = OTHER; note = Phosphorothioate internucleotide linkage
  modified_base 2: mod_base = OTHER; note = 2-prime-fluoroadenosine
  modified_base 3: mod_base = cm
  modified_base 4: mod_base = OTHER; note = 2-prime-fluorocytidine
  modified_base 5: mod_base = cm
  modified_base 6: mod_base = OTHER; note = 2-prime-fluorouridine
  modified_base 7: mod_base = gm
  modified_base 8: mod_base = OTHER; note = 2-prime-fluoroguanosine
  modified_base 9: mod_base = um
  modified_base 10: mod_base = OTHER; note = 2-prime-fluorouridine
  modified_base 11: mod_base = um
  modified_base 12: mod_base = OTHER; note = 2-prime-fluorocytidine
  modified_base 13: mod_base = OTHER; note = 2-prime-O-methyladenosine
  modified_base 13..20: mod_base = OTHER; note = Phosphorothioate internucleotide linkage
  modified_base 14: mod_base = OTHER; note = 2-prime-fluorouridine
  modified_base 15: mod_base = um
  modified_base 16: mod_base = OTHER; note = 2-prime-fluoroadenosine
  modified_base 17: mod_base = OTHER; note = 2-prime-O-methyladenosine
  modified_base 18: mod_base = OTHER; note = 2-prime-fluoroadenosine
  modified_base 19: mod_base = OTHER; note = 2-prime-O-methyladenosine
  modified_base 20: mod_base = OTHER; note = 2-prime-fluorouridine
  source 1..20: mol_type = other RNA
taccctggtttcattaaaat

SEQ ID NO: 376 - RNA, 20 nt, synthetic construct
  misc_feature 1..20: note = Description of Artificial Sequence: Synthetic oligonucleotide
  modified_base 1: mod_base = um
  modified_base 1..3: mod_base = OTHER; note = Phosphorothioate internucleotide linkage
  modified_base 2: mod_base = OTHER; note = 2-prime-fluorouridine
  modified_base 3: mod_base = um
  modified_base 4: mod_base = OTHER; note = 2-prime-fluorocytidine
  modified_base 5: mod_base = um
  modified_base 6: mod_base = OTHER; note = 2-prime-fluoroadenosine
  modified_base 7: mod_base = cm
  modified_base 8: mod_base = OTHER; note = 2-prime-fluorocytidine
  modified_base 9: mod_base = cm
  modified_base 10: mod_base = OTHER; note = 2-prime-fluorouridine
  modified_base 11: mod_base = gm
  modified_base 12: mod_base = OTHER; note = 2-prime-fluoroguanosine
  modified_base 13: mod_base = um
  modified_base 13..20: mod_base = OTHER; note = Phosphorothioate internucleotide linkage
  modified_base 14: mod_base = OTHER; note = 2-prime-fluorouridine
  modified_base 15: mod_base = um
  modified_base 16: mod_base = OTHER; note = 2-prime-fluorocytidine
  modified_base 17: mod_base = OTHER; note = 2-prime-O-methyladenosine
  modified_base 18: mod_base = OTHER; note = 2-prime-fluorouridine
  modified_base 19: mod_base = um
  modified_base 20: mod_base = OTHER; note = 2-prime-fluoroadenosine
  source 1..20: mol_type = other RNA
tttctaccctggtttcatta

SEQ ID NO: 377 - RNA, 20 nt, synthetic construct
  misc_feature 1..20: note = Description of Artificial Sequence: Synthetic oligonucleotide
  modified_base 1: mod_base = um
  modified_base 1..3: mod_base = OTHER; note = Phosphorothioate internucleotide linkage
  modified_base 2: mod_base = OTHER; note = 2-prime-fluorocytidine
  modified_base 3: mod_base = OTHER; note = 2-prime-O-methyladenosine
  modified_base 5: mod_base = um
  modified_base 6: mod_base = OTHER; note = 2-prime-fluoroguanosine
  modified_base 7: mod_base = cm
  modified_base 8: mod_base = OTHER; note = 2-prime-fluoroadenosine
  modified_base 9: mod_base = um
  modified_base 10: mod_base = OTHER; note = 2-prime-fluorouridine
  modified_base 11: mod_base = gm
  modified_base 12: mod_base = OTHER; note = 2-prime-fluorocytidine
  modified_base 13: mod_base = cm
  modified_base 13..20: mod_base = OTHER; note = Phosphorothioate internucleotide linkage
  modified_base 14: mod_base = OTHER; note = 2-prime-fluoroadenosine
  modified_base 15: mod_base = OTHER; note = 2-prime-O-methyladenosine
  modified_base 16: mod_base = OTHER; note = 2-prime-fluoroadenosine
  modified_base 17: mod_base = cm
  modified_base 17: mod_base = OTHER; note = 2-prime-fluorocytidine
  modified_base 18: mod_base = OTHER; note = 2-prime-fluoroadenosine
  modified_base 19: mod_base = OTHER; note = 2-prime-O-methyladenosine
  modified_base 20: mod_base = OTHER; note = 2-prime-fluorouridine
  source 1..20: mol_type = other RNA
tcagtgcattgccaaacaat

SEQ ID NO: 378 - RNA, 20 nt, synthetic construct
  misc_feature 1..20: note = Description of Artificial Sequence: Synthetic oligonucleotide
  modified_base 1: mod_base = um
  modified_base 1..3: mod_base = OTHER; note = Phosphorothioate internucleotide linkage
  modified_base 2: mod_base = OTHER; note = 2-prime-fluorocytidine
  modified_base 3: mod_base = um
  modified_base 4: mod_base = OTHER; note = 2-prime-fluorouridine
  modified_base 5: mod_base = OTHER; note = 2-prime-O-methyladenosine
  modified_base 6: mod_base = OTHER; note = 2-prime-fluoroguanosine
  modified_base 7: mod_base = OTHER; note = 2-prime-O-methyladenosine
  modified_base 8: mod_base = OTHER; note = 2-prime-fluoroadenosine
  modified_base 9: mod_base = OTHER; note = 2-prime-O-methyladenosine
  modified_base 10: mod_base = OTHER; note = 2-prime-fluorocytidine
  modified_base 11: mod_base = OTHER; note = 2-prime-O-methyladenosine
  modified_base 12: mod_base = OTHER; note = 2-prime-fluoroadenosine
  modified_base 13: mod_base = cm
  modified_base 13..20: mod_base = OTHER; note = Phosphorothioate internucleotide linkage
  modified_base 14: mod_base = OTHER; note = 2-prime-fluorouridine
  modified_base 15: mod_base = gm
  modified_base 16: mod_base = OTHER; note = 2-prime-fluoroadenosine
  modified_base 17: mod_base = gm
  modified_base 18: mod_base = OTHER; note = 2-prime-fluoroguanosine
  modified_base 19: mod_base = gm
  modified_base 20: mod_base = OTHER; note = 2-prime-fluoroguanosine
  source 1..20: mol_type = other RNA
tcttagaaacaactgagggg

SEQ ID NO: 379 - RNA, 20 nt, synthetic construct
  misc_feature 1..20: note = Description of Artificial Sequence: Synthetic oligonucleotide
  modified_base 1: mod_base = um
  modified_base 1..3: mod_base = OTHER; note = Phosphorothioate internucleotide linkage
  modified_base 2: mod_base = OTHER; note = 2-prime-fluoroadenosine
  modified_base 3: mod_base = um
  modified_base 4: mod_base = OTHER; note = 2-prime-fluoroadenosine
  modified_base 5: mod_base = cm
  modified_base 6: mod_base = OTHER; note = 2-prime-fluoroadenosine
  modified_base 7: mod_base = um
  modified_base 8: mod_base = OTHER; note = 2-prime-fluorocytidine
  modified_base 9: mod_base = um
  modified_base 10: mod_base = OTHER; note = 2-prime-fluorocytidine
  modified_base 11: mod_base = um
  modified_base 12: mod_base = OTHER; note = 2-prime-fluorocytidine
  modified_base 13: mod_base = gm
  modified_base 13..20: mod_base = OTHER; note = Phosphorothioate internucleotide linkage
  modified_base 14: mod_base = OTHER; note = 2-prime-fluorouridine
  modified_base 15: mod_base = cm
  modified_base 16: mod_base = OTHER; note = 2-prime-fluoroadenosine
  modified_base 17: mod_base = gm
  modified_base 18: mod_base = OTHER; note = 2-prime-fluorouridine
  modified_base 19: mod_base = cm
  modified_base 20: mod_base = OTHER; note = 2-prime-fluorocytidine
  source 1..20: mol_type = other RNA
tatacatctctcgtcagtcc

SEQ ID NO: 380 - RNA, 20 nt, synthetic construct
  misc_feature 1..20: note = Description of Artificial Sequence: Synthetic oligonucleotide
  modified_base 1: mod_base = um
  modified_base 1..3: mod_base = OTHER; note = Phosphorothioate internucleotide linkage
  modified_base 2: mod_base = OTHER; note = 2-prime-fluorouridine
  modified_base 3: mod_base = OTHER; note = 2-prime-O-methyladenosine
  modified_base 4: mod_base = OTHER; note = 2-prime-fluoroadenosine
  modified_base 5: mod_base = OTHER; note = 2-prime-O-methyladenosine
  modified_base 6: mod_base = OTHER; note = 2-prime-fluorouridine
  modified_base 7: mod_base = OTHER; note = 2-prime-O-methyladenosine
  modified_base 8: mod_base = OTHER; note = 2-prime-fluorouridine
  modified_base 9: mod_base = OTHER; note = 2-prime-O-methyladenosine
  modified_base 10: mod_base = OTHER; note = 2-prime-fluorocytidine
  modified_base 11: mod_base = OTHER; note = 2-prime-O-methyladenosine
  modified_base 12: mod_base = OTHER; note = 2-prime-fluorouridine
  modified_base 13: mod_base = cm
  modified_base 13..20: mod_base = OTHER; note = Phosphorothioate internucleotide linkage
  modified_base 14: mod_base = OTHER; note = 2-prime-fluorouridine
  modified_base 15: mod_base = cm
  modified_base 16: mod_base = OTHER; note = 2-prime-fluorouridine
  modified_base 17: mod_base = cm
  modified_base 18: mod_base = OTHER; note = 2-prime-fluoroguanosine
  modified_base 19: mod_base = um
  modified_base 20: mod_base = OTHER; note = 2-prime-fluorocytidine
  source 1..20: mol_type = other RNA
ttaaatatacatctctcgtc

SEQ ID NO: 381 - RNA, 20 nt, synthetic construct
  misc_feature 1..20: note = Description of Artificial Sequence: Synthetic oligonucleotide
  modified_base 1: mod_base = um
  modified_base 1..3: mod_base = OTHER; note = Phosphorothioate internucleotide linkage
  modified_base 2: mod_base = OTHER; note = 2-prime-fluoroguanosine
  modified_base 3: mod_base = um
  modified_base 4: mod_base = OTHER; note = 2-prime-fluorouridine
  modified_base 5: mod_base = um
  modified_base 6: mod_base = OTHER; note = 2-prime-fluoroguanosine
  modified_base 7: mod_base = cm
  modified_base 8: mod_base = OTHER; note = 2-prime-fluoroadenosine
  modified_base 9: mod_base = gm
  modified_base 10: mod_base = OTHER; note = 2-prime-fluorocytidine
  modified_base 11: mod_base = OTHER; note = 2-prime-O-methyladenosine
  modified_base 12: mod_base = OTHER; note = 2-prime-fluoroguanosine
  modified_base 13: mod_base = um
  modified_base 13..20: mod_base = OTHER; note = Phosphorothioate internucleotide linkage
  modified_base 14: mod_base = OTHER; note = 2-prime-fluorouridine
  modified_base 15: mod_base = OTHER; note = 2-prime-O-methyladenosine
  modified_base 16: mod_base = OTHER; note = 2-prime-fluoroadenosine
  modified_base 17: mod_base = OTHER; note = 2-prime-O-methyladenosine
  modified_base 18: mod_base = OTHER; note = 2-prime-fluoroadenosine
  modified_base 19: mod_base = OTHER; note = 2-prime-O-methyladenosine
  modified_base 20: mod_base = OTHER; note = 2-prime-fluoroadenosine
  source 1..20: mol_type = other RNA
tgtttgcagcagttaaaaaa

SEQ ID NO: 382 - RNA, 20 nt, synthetic construct
  misc_feature 1..20: note = Description of Artificial Sequence: Synthetic oligonucleotide
  modified_base 1: mod_base = um
  modified_base 1..3: mod_base = OTHER; note = Phosphorothioate internucleotide linkage
  modified_base 2: mod_base = OTHER; note = 2-prime-fluoroadenosine
  modified_base 3: mod_base = cm
  modified_base 4: mod_base = OTHER; note = 2-prime-fluoroadenosine
  modified_base 5: mod_base = OTHER; note = 2-prime-O-methyladenosine
  modified_base 6: mod_base = OTHER; note = 2-prime-fluorouridine
  modified_base 7: mod_base = gm
  modified_base 8: mod_base = OTHER; note = 2-prime-fluorouridine
  modified_base 9: mod_base = um
  modified_base 10: mod_base = OTHER; note = 2-prime-fluorouridine
  modified_base 11: mod_base = gm
  modified_base 12: mod_base = OTHER; note = 2-prime-fluorocytidine
  modified_base 13: mod_base = OTHER; note = 2-prime-O-methyladenosine
  modified_base 13..20: mod_base = OTHER; note = Phosphorothioate internucleotide linkage
  modified_base 14: mod_base = OTHER; note = 2-prime-fluoroguanosine
  modified_base 15: mod_base = cm
  modified_base 16: mod_base = OTHER; note = 2-prime-fluoroadenosine
  modified_base 17: mod_base = gm
  modified_base 18: mod_base = OTHER; note = 2-prime-fluorouridine
  modified_base 19: mod_base = um
  modified_base 20: mod_base = OTHER; note = 2-prime-fluoroadenosine
  source 1..20: mol_type = other RNA
tacaatgtttgcagcagtta

SEQ ID NO: 383 - RNA, 15 nt, synthetic construct
  misc_feature 1..15: note = Description of Artificial Sequence: Synthetic oligonucleotide
  modified_base 1: mod_base = OTHER; note = 2-prime-fluoroadenosine
  modified_base 1..3: mod_base = OTHER; note = Phosphorothioate internucleotide linkage
  modified_base 2: mod_base = OTHER; note = 2-prime-O-methyladenosine
  modified_base 3: mod_base = OTHER; note = 2-prime-fluorocytidine
  modified_base 4: mod_base = gm
  modified_base 5: mod_base = OTHER; note = 2-prime-fluorouridine
  modified_base 6: mod_base = OTHER; note = 2-prime-O-methyladenosine
  modified_base 7: mod_base = OTHER; note = 2-prime-fluoroadenosine
  modified_base 8: mod_base = cm
  modified_base 9: mod_base = OTHER; note = 2-prime-fluorouridine
  modified_base 10: mod_base = cm
  modified_base 11: mod_base = OTHER; note = 2-prime-fluorouridine
  modified_base 12: mod_base = um
  modified_base 13: mod_base = OTHER; note = 2-prime-fluorouridine
  modified_base 13..15: mod_base = OTHER; note = Phosphorothioate internucleotide linkage
  modified_base 14: mod_base = cm
  modified_base 15: mod_base = OTHER; note = 2-prime-fluoroadenosine
  source 1..15: mol_type = other RNA
aacgtaactctttca

SEQ ID NO: 384 - RNA, 15 nt, synthetic construct
  misc_feature 1..15: note = Description of Artificial Sequence: Synthetic oligonucleotide
  modified_base 1: mod_base = OTHER; note = 2-prime-fluorocytidine
  modified_base 1..3: mod_base = OTHER; note = Phosphorothioate internucleotide linkage
  modified_base 2: mod_base = um
  modified_base 3: mod_base = OTHER; note = 2-prime-fluoroadenosine
  modified_base 4: mod_base = um
  modified_base 5: mod_base = OTHER; note = 2-prime-fluoroguanosine
  modified_base 6: mod_base = cm
  modified_base 7: mod_base = OTHER; note = 2-prime-fluorocytidine
  modified_base 8: mod_base = cm
  modified_base 9: mod_base = OTHER; note = 2-prime-fluoroguanosine
  modified_base 10: mod_base = um
  modified_base 11: mod_base = OTHER; note = 2-prime-fluoroguanosine
  modified_base 12: mod_base = um
  modified_base 13: mod_base = OTHER; note = 2-prime-fluoroadenosine
  modified_base 13..15: mod_base = OTHER; note = Phosphorothioate internucleotide linkage
  modified_base 14: mod_base = OTHER; note = 2-prime-O-methyladenosine
  modified_base 15: mod_base = OTHER; note = 2-prime-fluoroadenosine
  source 1..15: mol_type = other RNA
ctatgcccgtgtaaa

SEQ ID NO: 385 - RNA, 15 nt, synthetic construct
  misc_feature 1..15: note = Description of Artificial Sequence: Synthetic oligonucleotide
  modified_base 1: mod_base = OTHER; note = 2-prime-fluoroguanosine
  modified_base 1..3: mod_base = OTHER; note = Phosphorothioate internucleotide linkage
  modified_base 2: mod_base = cm
  modified_base 3: mod_base = OTHER; note = 2-prime-fluorocytidine
  modified_base 4: mod_base = cm
  modified_base 5: mod_base = OTHER; note = 2-prime-fluoroguanosine
  modified_base 6: mod_base = um
  modified_base 7: mod_base = OTHER; note = 2-prime-fluoroguanosine
  modified_base 8: mod_base = um
  modified_base 9: mod_base = OTHER; note = 2-prime-fluoroadenosine
  modified_base 10: mod_base = OTHER; note = 2-prime-O-methyladenosine
  modified_base 11: mod_base = OTHER; note = 2-prime-fluoroadenosine
  modified_base 12: mod_base = gm
  modified_base 13: mod_base = OTHER; note = 2-prime-fluorouridine
  modified_base 13..15: mod_base = OTHER; note = Phosphorothioate internucleotide linkage
  modified_base 14: mod_base = OTHER; note = 2-prime-O-methyladenosine
  modified_base 15: mod_base = OTHER; note = 2-prime-fluoroadenosine
  source 1..15: mol_type = other RNA
gcccgtgtaaagtaa

SEQ ID NO: 386 - RNA, 15 nt, synthetic construct
  misc_feature 1..15: note = Description of Artificial Sequence: Synthetic oligonucleotide
  modified_base 1: mod_base = OTHER; note = 2-prime-fluoroadenosine
  modified_base 1..3: mod_base = OTHER; note = Phosphorothioate internucleotide linkage
  modified_base 2: mod_base = gm
  modified_base 3: mod_base = OTHER; note = 2-prime-fluorouridine
  modified_base 4: mod_base = cm
  modified_base 5: mod_base = OTHER; note = 2-prime-fluoroadenosine
  modified_base 6: mod_base = gm
  modified_base 7: mod_base = OTHER; note = 2-prime-fluoroguanosine
  modified_base 8: mod_base = OTHER; note = 2-prime-O-methyladenosine
  modified_base 9: mod_base = OTHER; note = 2-prime-fluoroguanosine
  modified_base 10: mod_base = OTHER; note = 2-prime-O-methyladenosine
  modified_base 11: mod_base = OTHER; note = 2-prime-fluoroguanosine
  modified_base 12: mod_base = um
  modified_base 13: mod_base = OTHER; note = 2-prime-fluoroguanosine
  modified_base 13..15: mod_base = OTHER; note = Phosphorothioate internucleotide linkage
  modified_base 14: mod_base = cm
  modified_base 15: mod_base = OTHER; note = 2-prime-fluoroadenosine
  source 1..15: mol_type = other RNA
agtcaggagagtgca

SEQ ID NO: 387 - RNA, 15 nt, synthetic construct
  misc_feature 1..15: note = Description of Artificial Sequence: Synthetic oligonucleotide
  modified_base 1: mod_base = OTHER; note = 2-prime-fluorouridine
  modified_base 1..3: mod_base = OTHER; note = Phosphorothioate internucleotide linkage
  modified_base 2: mod_base = gm
  modified_base 3: mod_base = OTHER; note = 2-prime-fluoroguanosine
  modified_base 4: mod_base = gm
  modified_base 5: mod_base = OTHER; note = 2-prime-fluorouridine
  modified_base 6: mod_base = OTHER; note = 2-prime-O-methyladenosine
  modified_base 7: mod_base = OTHER; note = 2-prime-fluorouridine
  modified_base 8: mod_base = um
  modified_base 9: mod_base = OTHER; note = 2-prime-fluoroguanosine
  modified_base 10: mod_base = OTHER; note = 2-prime-O-methyladenosine
  modified_base 11: mod_base = OTHER; note = 2-prime-fluoroadenosine
  modified_base 12: mod_base = um
  modified_base 13: mod_base = OTHER; note = 2-prime-fluoroguanosine
  modified_base 13..15: mod_base = OTHER; note = Phosphorothioate internucleotide linkage
  modified_base 14: mod_base = um
  modified_base 15: mod_base = OTHER; note = 2-prime-fluoroadenosine
  source 1..15: mol_type = other RNA
tgggtattgaatgta

SEQ ID NO: 388 - RNA, 15 nt, synthetic construct
  misc_feature 1..15: note = Description of Artificial Sequence: Synthetic oligonucleotide
  modified_base 1: mod_base = OTHER; note = 2-prime-fluorouridine
  misc_feature 1..3
  modified_base 2: mod_base = gm
  modified_base 3: mod_base = OTHER; note = 2-prime-fluoroguanosine
  modified_base 4: mod_base = um
  modified_base 5: mod_base = OTHER; note = 2-prime-fluoroadenosine
  modified_base 6: mod_base = OTHER; note = 2-prime-O-methyladenosine
  modified_base 7: mod_base = OTHER; note = 2-prime-fluoroguanosine
  modified_base 8: mod_base = um
  modified_base 9: mod_base = OTHER; note = 2-prime-fluoroguanosine
  modified_base 10: mod_base = gm
  modified_base 11: mod_base = OTHER; note = 2-prime-fluoroadenosine
  modified_base 12: mod_base = gm
  modified_base 13: mod_base = OTHER; note = 2-prime-fluoroguanosine
  misc_feature 13..15
  modified_base 14: mod_base = OTHER; note = 2-prime-O-methyladenosine
  modified_base 15: mod_base = OTHER; note = 2-prime-fluoroadenosine
  source 1..15: mol_type = other RNA
tggtaagtggaggaa

SEQ ID NO: 389 - RNA, 15 nt, synthetic construct
  misc_feature 1..15: note = Description of Artificial Sequence: Synthetic oligonucleotide
  modified_base 1: mod_base = OTHER; note = 2-prime-fluoroadenosine
  modified_base 1..3: mod_base = OTHER; note = Phosphorothioate internucleotide linkage
  modified_base 2: mod_base = gm
  modified_base 3: mod_base = OTHER; note = 2-prime-fluorouridine
  modified_base 4: mod_base = gm
  modified_base 5: mod_base = OTHER; note = 2-prime-fluoroguanosine
  modified_base 6: mod_base = OTHER; note = 2-prime-O-methyladenosine
  modified_base 7: mod_base = OTHER; note = 2-prime-fluoroguanosine
  modified_base 8: mod_base = gm
  modified_base 9: mod_base = OTHER; note = 2-prime-fluoroadenosine
  modified_base 10: mod_base = OTHER; note = 2-prime-O-methyladenosine
  modified_base 11: mod_base = OTHER; note = 2-prime-fluoroadenosine
  modified_base 12: mod_base = um
  modified_base 13: mod_base = OTHER; note = 2-prime-fluoroguanosine
  modified_base 13..15: mod_base = OTHER; note = Phosphorothioate internucleotide linkage
  modified_base 14: mod_base = um
  modified_base 15: mod_base = OTHER; note = 2-prime-fluoroadenosine
  source 1..15: mol_type = other RNA
agtggaggaaatgta

SEQ ID NO: 390 - RNA, 15 nt, synthetic construct
  misc_feature 1..15: note = Description of Artificial Sequence: Synthetic oligonucleotide
  modified_base 1: mod_base = OTHER; note = 2-prime-fluorouridine
  misc_feature 1..3
  modified_base 2: mod_base = um
  modified_base 3: mod_base = OTHER; note = 2-prime-fluoroguanosine
  modified_base 4: mod_base = gm
  modified_base 5: mod_base = OTHER; note = 2-prime-fluoroadenosine
  modified_base 6: mod_base = OTHER; note = 2-prime-O-methyladenosine
  modified_base 7: mod_base = OTHER; note = 2-prime-fluorocytidine
  modified_base 8: mod_base = um
  modified_base 9: mod_base = OTHER; note = 2-prime-fluorocytidine
  modified_base 10: mod_base = um
  modified_base 11: mod_base = OTHER; note = 2-prime-fluoroguanosine
  modified_base 12: mod_base = um
  modified_base 13: mod_base = OTHER; note = 2-prime-fluoroguanosine
  misc_feature 13..15
  modified_base 14: mod_base = cm
  modified_base 15: mod_base = OTHER; note = 2-prime-fluoroadenosine
  source 1..15: mol_type = other RNA
ttggaactctgtgca

SEQ ID NO: 391 - RNA, 15 nt, synthetic construct
  misc_feature 1..15: note = Description of Artificial Sequence: Synthetic oligonucleotide
  modified_base 1: mod_base = OTHER; note = 2-prime-fluorouridine
  modified_base 1..3: mod_base = OTHER; note = Phosphorothioate internucleotide linkage
  modified_base 2: mod_base = gm
  modified_base 3: mod_base = OTHER; note = 2-prime-fluoroadenosine
  modified_base 4: mod_base = gm
  modified_base 5: mod_base = OTHER; note = 2-prime-fluoroguanosine
  modified_base 6: mod_base = OTHER; note = 2-prime-O-methyladenosine
  modified_base 7: mod_base = OTHER; note = 2-prime-fluoroguanosine
  modified_base 9: mod_base = OTHER; note = 2-prime-fluorocytidine
  modified_base 10: mod_base = cm
  modified_base 11: mod_base = OTHER; note = 2-prime-fluorocytidine
  modified_base 12: mod_base = um
  modified_base 13: mod_base = OTHER; note = 2-prime-fluorouridine
  modified_base 13..15: mod_base = OTHER; note = Phosphorothioate internucleotide linkage
  modified_base 14: mod_base = gm
  modified_base 15: mod_base = OTHER; note = 2-prime-O-methyladenosine
  modified_base 15: mod_base = OTHER; note = 2-prime-fluoroadenosine
  source 1..15: mol_type = other RNA
tgaggaggcccttaa

SEQ ID NO: 392 - RNA, 15 nt, synthetic construct
  misc_feature 1..15: note = Description of Artificial Sequence: Synthetic oligonucleotide
  modified_base 1: mod_base = OTHER; note = 2-prime-fluoroadenosine
  modified_base 1..3: mod_base = OTHER; note = Phosphorothioate internucleotide linkage
  modified_base 2: mod_base = gm
  modified_base 3: mod_base = OTHER; note = 2-prime-fluoroguanosine
  modified_base 4: mod_base = gm
  modified_base 5: mod_base = OTHER; note = 2-prime-O-methyladenosine
  modified_base 5: mod_base = OTHER; note = 2-prime-fluoroadenosine
  modified_base 6: mod_base = gm
  modified_base 7: mod_base = OTHER; note = 2-prime-fluoroguanosine
  modified_base 8: mod_base = cm
  modified_base 9: mod_base = OTHER; note = 2-prime-fluorouridine
  modified_base 11: mod_base = OTHER; note = 2-prime-fluorocytidine
  modified_base 12: mod_base = um
  modified_base 13: mod_base = OTHER; note = 2-prime-fluoroguanosine
  modified_base 13..15: mod_base = OTHER; note = Phosphorothioate internucleotide linkage
  modified_base 14: mod_base = OTHER; note = 2-prime-O-methyladenosine
  modified_base 15: mod_base = OTHER; note = 2-prime-fluoroadenosine
  source 1..15: mol_type = other RNA
agggaagctactgaa

SEQ ID NO: 393 - RNA, 15 nt, synthetic construct
  misc_feature 1..15: note = Description of Artificial Sequence: Synthetic oligonucleotide
  modified_base 1: mod_base = OTHER; note = 2-prime-fluoroadenosine
  modified_base 1..3: mod_base = OTHER; note = Phosphorothioate internucleotide linkage
  modified_base 2: mod_base = um
  modified_base 3: mod_base = OTHER; note = 2-prime-fluoroadenosine
  modified_base 4: mod_base = OTHER; note = 2-prime-O-methyladenosine
  modified_base 5: mod_base = OTHER; note = 2-prime-fluorocytidine
  modified_base 6: mod_base = OTHER; note = 2-prime-O-methyladenosine
  modified_base 7: mod_base = OTHER; note = 2-prime-fluorocytidine
  modified_base 8: mod_base = gm
  modified_base 9: mod_base = OTHER; note = 2-prime-fluorouridine
  modified_base 10: mod_base = OTHER; note = 2-prime-O-methyladenosine
  modified_base 11: mod_base = OTHER; note = 2-prime-fluoroadenosine
  modified_base 12: mod_base = gm
  modified_base 13: mod_base = OTHER; note = 2-prime-fluoroadenosine
  modified_base 13..15: mod_base = OTHER; note = Phosphorothioate internucleotide linkage
  modified_base 14: mod_base = OTHER; note = 2-prime-O-methyladenosine
  modified_base 15: mod_base = OTHER; note = 2-prime-fluoroadenosine
  source 1..15: mol_type = other RNA
ataacacgtaagaaa

SEQ ID NO: 394 - RNA, 15 nt, synthetic construct
  misc_feature 1..15: note = Description of Artificial Sequence: Synthetic oligonucleotide
  modified_base 1..3: mod_base = OTHER; note = Phosphorothioate internucleotide linkage
  modified_base 1: mod_base = OTHER; note = 2-prime-fluorouridine
  modified_base 2: mod_base = OTHER; note = 2-prime-O-methyladenosine
  modified_base 3: mod_base = OTHER; note = 2-prime-fluorocytidine
  modified_base 4: mod_base = OTHER; note = 2-prime-O-methyladenosine
  modified_base 5: mod_base = OTHER; note = 2-prime-fluorouridine
  modified_base 6: mod_base = um
  modified_base 7: mod_base = OTHER; note = 2-prime-fluorouridine
  modified_base 8: mod_base = gm
  modified_base 9: mod_base = OTHER; note = 2-prime-fluorouridine
  modified_base 10: mod_base = OTHER; note = 2-prime-O-methyladenosine
  modified_base 11: mod_base = OTHER; note = 2-prime-fluoroadenosine
  modified_base 12: mod_base = gm
  modified_base 13..15: mod_base = OTHER; note = Phosphorothioate internucleotide linkage
  modified_base 13: mod_base = OTHER; note = 2-prime-fluoroadenosine
  modified_base 14: mod_base = OTHER; note = 2-prime-O-methyladenosine
  modified_base 15: mod_base = OTHER; note = 2-prime-fluoroadenosine
  source 1..15: mol_type = other RNA
tacatttgtaagaaa

SEQ ID NO: 395 - RNA, 15 nt, synthetic construct
  misc_feature 1..15: note = Description of Artificial Sequence: Synthetic oligonucleotide
  modified_base 1: mod_base = OTHER; note = 2-prime-fluoroguanosine
  modified_base 1..3: mod_base = OTHER; note = Phosphorothioate internucleotide linkage
  modified_base 2: mod_base = um
  modified_base 3: mod_base = OTHER; note = 2-prime-fluoroadenosine
  modified_base 4: mod_base = OTHER; note = 2-prime-O-methyladenosine
  modified_base 5: mod_base = OTHER; note = 2-prime-fluoroguanosine
  modified_base 6: mod_base = OTHER; note = 2-prime-O-methyladenosine
  modified_base 7: mod_base = OTHER; note = 2-prime-fluoroadenosine
  modified_base 8: mod_base = OTHER; note = 2-prime-O-methyladenosine
  modified_base 9: mod_base = OTHER; note = 2-prime-fluorouridine
  modified_base 10: mod_base = OTHER; note = 2-prime-O-methyladenosine
  modified_base 11: mod_base = OTHER; note = 2-prime-fluoroadenosine
  modified_base 12: mod_base = cm
  modified_base 13: mod_base = OTHER; note = 2-prime-fluoroadenosine
  modified_base 13..15: mod_base = OTHER; note = Phosphorothioate internucleotide linkage
  modified_base 14: mod_base = cm
  modified_base 15: mod_base = OTHER; note = 2-prime-fluoroadenosine
  source 1..15: mol_type = other RNA
gtaagaaataacaca

SEQ ID NO: 396 - RNA, 15 nt, synthetic construct
  misc_feature 1..15: note = Description of Artificial Sequence: Synthetic oligonucleotide
  modified_base 1: mod_base = OTHER; note = 2-prime-fluorocytidine
  modified_base 1..3: mod_base = OTHER; note = Phosphorothioate internucleotide linkage
  modified_base 2: mod_base = OTHER; note = 2-prime-O-methyladenosine
  modified_base 3: mod_base = OTHER; note = 2-prime-fluorocytidine
  modified_base 4: mod_base = um
  modified_base 5: mod_base = OTHER; note = 2-prime-fluoroguanosine
  modified_base 6: mod_base = um
  modified_base 7: mod_base = OTHER; note = 2-prime-fluoroguanosine
  modified_base 8: mod_base = OTHER; note = 2-prime-O-methyladenosine
  modified_base 9: mod_base = OTHER; note = 2-prime-fluoroadenosine
  modified_base 10: mod_base = um
  modified_base 11: mod_base = OTHER; note = 2-prime-fluoroguanosine
  modified_base 12: mod_base = um
  modified_base 13: mod_base = OTHER; note = 2-prime-fluoroadenosine
  modified_base 13..15: mod_base = OTHER; note = Phosphorothioate internucleotide linkage
  modified_base 14: mod_base = OTHER; note = 2-prime-O-methyladenosine
  modified_base 15: mod_base = OTHER; note = 2-prime-fluoroadenosine
  source 1..15: mol_type = other RNA
cactgtgaatgtaaa

SEQ ID NO: 397 - RNA, 15 nt, synthetic construct
  misc_feature 1..15: note = Description of Artificial Sequence: Synthetic oligonucleotide
  modified_base 1..3: mod_base = OTHER; note = Phosphorothioate internucleotide linkage
  modified_base 2: mod_base = OTHER; note = 2-prime-O-methyladenosine
  modified_base 3: mod_base = OTHER; note = 2-prime-fluoroguanosine
  modified_base 4: mod_base = cm
  modified_base 5: mod_base = OTHER; note = 2-prime-fluorouridine
  modified_base 6: mod_base = cm
  modified_base 7: mod_base = OTHER; note = 2-prime-fluoroadenosine
  modified_base 8: mod_base = um
  modified_base 9: mod_base = OTHER; note = 2-prime-fluorouridine
  modified_base 10: mod_base = OTHER; note = 2-prime-O-methyladenosine
  modified_base 11: mod_base = OTHER; note = 2-prime-fluoroguanosine
  modified_base 12: mod_base = um
  modified_base 12: mod_base = OTHER; note = 2-prime-fluorouridine
  modified_base 13: mod_base = OTHER; note = 2-prime-fluoroadenosine
  modified_base 13..15: mod_base = OTHER; note = Phosphorothioate internucleotide linkage
  modified_base 14: mod_base = OTHER; note = 2-prime-O-methyladenosine
  modified_base 15: mod_base = OTHER; note = 2-prime-fluoroadenosine
  source 1..15: mol_type = other RNA
gagctcattagtaaa

SEQ ID NO: 398 - RNA, 15 nt, synthetic construct
  misc_feature 1..15: note = Description of Artificial Sequence: Synthetic oligonucleotide
  modified_base 1: mod_base = OTHER; note = 2-prime-fluorocytidine
  modified_base 1..3: mod_base = OTHER; note = Phosphorothioate internucleotide linkage
  modified_base 2: mod_base = OTHER; note = 2-prime-O-methyladenosine
  modified_base 3: mod_base = OTHER; note = 2-prime-fluorocytidine
  modified_base 4: mod_base = gm
  modified_base 5: mod_base = OTHER; note = 2-prime-fluorocytidine
  modified_base 6: mod_base = OTHER; note = 2-prime-O-methyladenosine
  modified_base 7: mod_base = OTHER; note = 2-prime-fluorouridine
  modified_base 8: mod_base = OTHER; note = 2-prime-O-methyladenosine
  modified_base 9: mod_base = OTHER; note = 2-prime-fluorouridine
  modified_base 10: mod_base = OTHER; note = 2-prime-O-methyladenosine
  modified_base 11: mod_base = OTHER; note = 2-prime-fluorocytidine
  modified_base 12: mod_base = OTHER; note = 2-prime-O-methyladenosine
  modified_base 13: mod_base = OTHER; note = 2-prime-fluorouridine
  modified_base 13..15: mod_base = OTHER; note = Phosphorothioate internucleotide linkage
  modified_base 14: mod_base = OTHER; note = 2-prime-O-methyladenosine
  modified_base 15: mod_base = OTHER; note = 2-prime-fluoroadenosine
  source 1..15: mol_type = other RNA
cacgcatatacataa

SEQ ID NO: 399 - RNA, 15 nt, synthetic construct
  misc_feature 1..15: note = Description of Artificial Sequence: Synthetic oligonucleotide
  modified_base 1: mod_base = OTHER; note = 2-prime-fluoroguanosine
  modified_base 1..3: mod_base = OTHER; note = Phosphorothioate internucleotide linkage
  modified_base 2: mod_base = OTHER; note = 2-prime-O-methyladenosine
  modified_base 3: mod_base = OTHER; note = 2-prime-fluorocytidine
  modified_base 4: mod_base = OTHER; note = 2-prime-O-methyladenosine
  modified_base 5: mod_base = OTHER; note = 2-prime-fluorocytidine
  modified_base 6: mod_base = OTHER; note = 2-prime-O-methyladenosine
  modified_base 7: mod_base = OTHER; note = 2-prime-fluorouridine
  modified_base 8: mod_base = cm
  modified_base 9: mod_base = OTHER; note = 2-prime-fluorouridine
  modified_base 10: mod_base = OTHER; note = 2-prime-O-methyladenosine
  modified_base 11: mod_base = OTHER; note = 2-prime-fluorouridine
  modified_base 12: mod_base = OTHER; note = 2-prime-O-methyladenosine
  modified_base 13: mod_base = OTHER; note = 2-prime-fluoroadenosine
  modified_base 13..15: mod_base = OTHER; note = Phosphorothioate internucleotide linkage
  modified_base 14: mod_base = um
  modified_base 15: mod_base = OTHER; note = 2-prime-fluoroadenosine
  source 1..15: mol_type = other RNA
gacacatctataata

SEQ ID NO: 400 - RNA, 15 nt, synthetic construct
  misc_feature 1..15: note = Description of Artificial Sequence: Synthetic oligonucleotide
  modified_base 1: mod_base = OTHER; note = 2-prime-fluorocytidine
  modified_base 1..3: mod_base = OTHER; note = Phosphorothioate internucleotide linkage
  modified_base 2: mod_base = OTHER; note = 2-prime-O-methyladenosine
  modified_base 3: mod_base = OTHER; note = 2-prime-fluorocytidine
  modified_base 4: mod_base = OTHER; note = 2-prime-O-methyladenosine
  modified_base 5: mod_base = OTHER; note = 2-prime-fluorocytidine
  modified_base 6: mod_base = OTHER; note = 2-prime-O-methyladenosine
  modified_base 7: mod_base = OTHER; note = 2-prime-fluorocytidine
  modified_base 8: mod_base = cm
  modified_base 9: mod_base = OTHER; note = 2-prime-fluorouridine
  modified_base 10: mod_base = cm
  modified_base 11: mod_base = cm
  modified_base 11: mod_base = OTHER; note = 2-prime-fluorouridine
  modified_base 13: mod_base = OTHER; note = 2-prime-fluoroadenosine
  modified_base 13..15: mod_base = OTHER; note = Phosphorothioate internucleotide linkage
  modified_base 14: mod_base = OTHER; note = 2-prime-O-methyladenosine
  modified_base 15: mod_base = OTHER; note = 2-prime-fluoroadenosine
  source 1..15: mol_type = other RNA
cacacacctctcaaa

SEQ ID NO: 401 - RNA, 15 nt, synthetic construct
  misc_feature 1..15: note = Description of Artificial Sequence: Synthetic oligonucleotide
  modified_base 1: mod_base = OTHER; note = 2-prime-fluorouridine
  modified_base 1..3: mod_base = OTHER; note = Phosphorothioate internucleotide linkage
  modified_base 2: mod_base = OTHER; note = 2-prime-O-methyladenosine
  modified_base 3: mod_base = OTHER; note = 2-prime-fluorouridine
  modified_base 4: mod_base = cm
  modified_base 5: mod_base = OTHER; note = 2-prime-fluoroadenosine
  modified_base 6: mod_base = um
  modified_base 7: mod_base = OTHER; note = 2-prime-fluoroguanosine
  modified_base 8: mod_base = um
  modified_base 9: mod_base = OTHER; note = 2-prime-fluorouridine
  modified_base 10: mod_base = cm
  modified_base 11: mod_base = OTHER; note = 2-prime-fluorocytidine
  modified_base 12: mod_base = um
  modified_base 13: mod_base = OTHER; note = 2-prime-fluoroadenosine
  modified_base 13..15: mod_base = OTHER; note = Phosphorothioate internucleotide linkage
  modified_base 14: mod_base = OTHER; note = 2-prime-O-methyladenosine
  modified_base 15: mod_base = OTHER; note = 2-prime-fluoroadenosine
  source 1..15: mol_type = other RNA
tatcatgttcctaaa

SEQ ID NO: 402 - RNA, 15 nt, synthetic construct
  misc_feature 1..15: note = Description of Artificial Sequence: Synthetic oligonucleotide
  modified_base 1: mod_base = OTHER; note = 2-prime-fluoroguanosine
  modified_base 1..3: mod_base = OTHER; note = Phosphorothioate internucleotide linkage
  modified_base 2: mod_base = cm
  modified_base 3: mod_base = OTHER; note = 2-prime-fluoroadenosine
  modified_base 4: mod_base = OTHER; note = 2-prime-O-methyladenosine
  modified_base 5: mod_base = OTHER; note = 2-prime-fluoroadenosine
  modified_base 6: mod_base = um
  modified_base 7: mod_base = OTHER; note = 2-prime-fluoroguanosine
  modified_base 8: mod_base = um
  modified_base 9: mod_base = OTHER; note = 2-prime-fluoroguanosine
  modified_base 10: mod_base = OTHER; note = 2-prime-O-methyladenosine
  modified_base 11: mod_base = OTHER; note = 2-prime-fluorouridine
  modified_base 12: mod_base = um
  modified_base 13: mod_base = OTHER; note = 2-prime-fluoroadenosine
  modified_base 13..15: mod_base = OTHER; note = Phosphorothioate internucleotide linkage
  modified_base 14: mod_base = OTHER; note = 2-prime-O-methyladenosine
  modified_base 15: mod_base = OTHER; note = 2-prime-fluoroadenosine
  source 1..15: mol_type = other RNA
gcaaatgtgattaaa

SEQ ID NO: 403 - RNA, 15 nt, synthetic construct
  misc_feature 1..15: note = Description of Artificial Sequence: Synthetic oligonucleotide
  modified_base 1: mod_base = OTHER; note = 2-prime-fluorouridine
  modified_base 1..3: mod_base = OTHER; note = Phosphorothioate internucleotide linkage
  modified_base 2: mod_base = gm
  modified_base 3: mod_base = OTHER; note = 2-prime-fluorouridine
  modified_base 4: mod_base = gm
  modified_base 5: mod_base = OTHER; note = 2-prime-fluoroadenosine
  modified_base 6: mod_base = um
  modified_base 7: mod_base = OTHER; note = 2-prime-fluorouridine
  modified_base 8: mod_base = OTHER; note = 2-prime-O-methyladenosine
  modified_base 9: mod_base = OTHER; note = 2-prime-fluoroadenosine
  modified_base 10: mod_base = um
  modified_base 11: mod_base = OTHER; note = 2-prime-fluorouridine
  modified_base 12: mod_base = um
  modified_base 13: mod_base = OTHER; note = 2-prime-fluoroguanosine
  modified_base 13..15: mod_base = OTHER; note = Phosphorothioate internucleotide linkage
  modified_base 14: mod_base = gm
  modified_base 15: mod_base = OTHER; note = 2-prime-fluoroadenosine
  source 1..15: mol_type = other RNA
tgtgattaatttgga

SEQ ID NO: 404 - RNA, 15 nt, synthetic construct
  misc_feature 1..15: note = Description of Artificial Sequence: Synthetic oligonucleotide
  modified_base 1: mod_base = OTHER; note = 2-prime-fluoroguanosine
  modified_base 1..3: mod_base = OTHER; note = Phosphorothioate internucleotide linkage
  modified_base 2: mod_base = gm
  modified_base 3: mod_base = OTHER; note = 2-prime-fluorouridine
  modified_base 4: mod_base = um
  modified_base 5: mod_base = OTHER; note = 2-prime-fluoroguanosine
  modified_base 6: mod_base = um
  modified_base 7: mod_base = OTHER; note = 2-prime-fluorocytidine
  modified_base 8: mod_base = OTHER; note = 2-prime-O-methyladenosine
  modified_base 9: mod_base = OTHER; note = 2-prime-fluoroadenosine
  modified_base 10: mod_base = gm
  modified_base 11: mod_base = OTHER; note = 2-prime-fluorouridine
  modified_base 12: mod_base = um
  modified_base 13: mod_base = OTHER; note = 2-prime-fluorouridine
  modified_base 13..15: mod_base = OTHER; note = Phosphorothioate internucleotide linkage
  modified_base 14: mod_base = um
  modified_base 15: mod_base = OTHER; note = 2-prime-fluoroadenosine
  source 1..15: mol_type = other RNA
ggttgtcaagtttta

SEQ ID NO: 405 - RNA, 15 nt, synthetic construct
  misc_feature 1..15: note = Description of Artificial Sequence: Synthetic oligonucleotide
  modified_base 1: mod_base = OTHER; note = 2-prime-fluorouridine
  modified_base 1..3: mod_base = OTHER; note = Phosphorothioate internucleotide linkage
  modified_base 2: mod_base = um
  modified_base 3: mod_base = OTHER; note = 2-prime-fluorouridine
  modified_base 4: mod_base = cm
  modified_base 5: mod_base = OTHER; note = 2-prime-fluorocytidine
  modified_base 6: mod_base = um
  modified_base 7: mod_base = OTHER; note = 2-prime-fluoroguanosine
  modified_base 8: mod_base = cm
  modified_base 9: mod_base = OTHER; note = 2-prime-fluorouridine
  modified_base 10: mod_base = gm
  modified_base 11: mod_base = OTHER; note = 2-prime-fluoroguanosine
  modified_base 12: mod_base = um
  modified_base 13: mod_base = OTHER; note = 2-prime-fluoroadenosine
  modified_base 13..15: mod_base = OTHER; note = Phosphorothioate internucleotide linkage
  modified_base 14: mod_base = OTHER; note = 2-prime-O-methyladenosine
  modified_base 15: mod_base = OTHER; note = 2-prime-fluoroadenosine
  source 1..15: mol_type = other RNA
tttcctgctggtaaa

SEQ ID NO: 406 - RNA, 15 nt, synthetic construct
  misc_feature 1..15: note = Description of Artificial Sequence: Synthetic oligonucleotide
  modified_base 1: mod_base = OTHER; note = 2-prime-fluorocytidine
  modified_base 1..3: mod_base = OTHER; note = Phosphorothioate internucleotide linkage
  modified_base 2: mod_base = cm
  modified_base 3: mod_base = OTHER; note = 2-prime-fluorouridine
  modified_base 4: mod_base = gm
  modified_base 5: mod_base = OTHER; note = 2-prime-fluorocytidine
  modified_base 6: mod_base = um
  modified_base 7: mod_base = OTHER; note = 2-prime-fluoroguanosine
  modified_base 8: mod_base = gm
  modified_base 9: mod_base = OTHER; note = 2-prime-fluorouridine
  modified_base 10: mod_base = OTHER; note = 2-prime-O-methyladenosine
  modified_base 11: mod_base = OTHER; note = 2-prime-fluoroadenosine
  modified_base 12: mod_base = um
  modified_base 13: mod_base = OTHER; note = 2-prime-fluoroadenosine
  modified_base 13..15: mod_base = OTHER; note = Phosphorothioate internucleotide linkage
  modified_base 14: mod_base = um
  modified_base 15: mod_base = OTHER; note = 2-prime-fluoroadenosine
  source 1..15: mol_type = other RNA
cctgctggtaatata

SEQ ID NO: 407 - RNA, 15 nt, synthetic construct
  misc_feature 1..15: note = Description of Artificial Sequence: Synthetic oligonucleotide
  modified_base 1: mod_base = OTHER; note = 2-prime-fluoroguanosine
  modified_base 1..3: mod_base = OTHER; note = Phosphorothioate internucleotide linkage
  modified_base 2: mod_base = gm
  modified_base 3: mod_base = OTHER; note = 2-prime-fluoroguanosine
  modified_base 4: mod_base = OTHER; note = 2-prime-O-methyladenosine
  modified_base 5: mod_base = OTHER; note = 2-prime-fluoroadenosine
  modified_base 6: mod_base = OTHER; note = 2-prime-O-methyladenosine
  modified_base 7: mod_base = OTHER; note = 2-prime-fluoroguanosine
  modified_base 8: mod_base = OTHER; note = 2-prime-O-methyladenosine
  modified_base 9: mod_base = OTHER; note = 2-prime-fluorouridine
  modified_base 10: mod_base = um
  modified_base 11: mod_base = OTHER; note = 2-prime-fluorouridine
  modified_base 12: mod_base = um
  modified_base 13: mod_base = OTHER; note = 2-prime-fluoroadenosine
  modified_base 13..15: mod_base = OTHER; note = Phosphorothioate internucleotide linkage
  modified_base 14: mod_base = OTHER; note = 2-prime-O-methyladenosine
  modified_base 15: mod_base = OTHER; note = 2-prime-fluoroadenosine
  source 1..15: mol_type = other RNA
gggaaagattttaaa

SEQ ID NO: 408 - RNA, 15 nt, synthetic construct
  misc_feature 1..15: note = Description of Artificial Sequence: Synthetic oligonucleotide
  modified_base 1: mod_base = OTHER; note = 2-prime-fluoroadenosine
  modified_base 1..3: mod_base = OTHER; note = Phosphorothioate internucleotide linkage
  modified_base 2: mod_base = OTHER; note = 2-prime-O-methyladenosine
  modified_base 3: mod_base = OTHER; note = 2-prime-fluorouridine
  modified_base 4: mod_base = gm
  modified_base 5: mod_base = OTHER; note = 2-prime-fluoroadenosine
  modified_base 6: mod_base = OTHER; note = 2-prime-O-methyladenosine
  modified_base 7: mod_base = OTHER; note = 2-prime-fluoroadenosine
  modified_base 8: mod_base = cm
  modified_base 9: mod_base = OTHER; note = 2-prime-fluorocytidine
  modified_base 10: mod_base = OTHER; note = 2-prime-O-methyladenosine
  modified_base 11: mod_base = OTHER; note = 2-prime-fluoroguanosine
  modified_base 12: mod_base = gm
  modified_base 13: mod_base = OTHER; note = 2-prime-fluoroguanosine
  modified_base 13..15: mod_base = OTHER; note = Phosphorothioate internucleotide linkage
  modified_base 14: mod_base = um
  modified_base 15: mod_base = OTHER; note = 2-prime-fluoroadenosine
  source 1..15: mol_type = other RNA
aatgaaaccagggta

SEQ ID NO: 409 - RNA, 15 nt, synthetic construct
  misc_feature 1..15: note = Description of Artificial Sequence: Synthetic oligonucleotide
  modified_base 1: mod_base = OTHER; note = 2-prime-fluoroadenosine
  modified_base 1..3: mod_base = OTHER; note = Phosphorothioate internucleotide linkage
  modified_base 2: mod_base = OTHER; note = 2-prime-O-methyladenosine
  modified_base 3: mod_base = OTHER; note = 2-prime-fluoroadenosine
  modified_base 4: mod_base = cm
  modified_base 5: mod_base = OTHER; note = 2-prime-fluorocytidine
  modified_base 6: mod_base = OTHER; note = 2-prime-O-methyladenosine
  modified_base 7: mod_base = OTHER; note = 2-prime-fluoroguanosine
  modified_base 8: mod_base = gm
  modified_base 9: mod_base = OTHER; note = 2-prime-fluoroguanosine
  modified_base 10: mod_base = um
  modified_base 11: mod_base = OTHER; note = 2-prime-fluoroadenosine
  modified_base 12: mod_base = gm
  modified_base 13: mod_base = OTHER; note = 2-prime-fluoroadenosine
  modified_base 13..15: mod_base = OTHER; note = Phosphorothioate internucleotide linkage
  modified_base 14: mod_base = OTHER; note = 2-prime-O-methyladenosine
  modified_base 15: mod_base = OTHER; note = 2-prime-fluoroadenosine
  source 1..15: mol_type = other RNA
aaaccagggtagaaa

SEQ ID NO: 410 - RNA, 15 nt, synthetic construct
  misc_feature 1..15: note = Description of Artificial Sequence: Synthetic oligonucleotide
  modified_base 1: mod_base = um
  modified_base 1: mod_base = OTHER; note = 2-prime-fluorouridine
  modified_base 1..3: mod_base = OTHER; note = Phosphorothioate internucleotide linkage
  modified_base 3: mod_base = OTHER; note = 2-prime-fluoroguanosine
  modified_base 4: mod_base = gm
  modified_base 5: mod_base = OTHER; note = 2-prime-fluorocytidine
  modified_base 6: mod_base = OTHER; note = 2-prime-O-methyladenosine
  modified_base 7: mod_base = OTHER; note = 2-prime-fluoroadenosine
  modified_base 8: mod_base = um
  modified_base 9: mod_base = OTHER; note = 2-prime-fluoroguanosine
  modified_base 10: mod_base = cm
  modified_base 11: mod_base = OTHER; note = 2-prime-fluoroadenosine
  modified_base 12: mod_base = cm
  modified_base 13: mod_base = OTHER; note = 2-prime-fluorouridine
  modified_base 13..15: mod_base = OTHER; note = Phosphorothioate internucleotide linkage
  modified_base 14: mod_base = gm
  modified_base 15: mod_base = OTHER; note = 2-prime-fluoroadenosine
  source 1..15: mol_type = other RNA
ttggcaatgcactga

SEQ ID NO: 411 - RNA, 15 nt, synthetic construct
  misc_feature 1..15: note = Description of Artificial Sequence: Synthetic oligonucleotide
  modified_base 1: mod_base = OTHER; note = 2-prime-fluorocytidine
  modified_base 1..3: mod_base = OTHER; note = Phosphorothioate internucleotide linkage
  modified_base 2: mod_base = OTHER; note = 2-prime-O-methyladenosine
  modified_base 3: mod_base = OTHER; note = 2-prime-fluoroguanosine
  modified_base 4: mod_base = um
  modified_base 5: mod_base = OTHER; note = 2-prime-fluorouridine
  modified_base 6: mod_base = gm
  modified_base 7: mod_base = OTHER; note = 2-prime-fluorouridine
  modified_base 8: mod_base = um
  modified_base 9: mod_base = OTHER; note = 2-prime-fluorouridine
  modified_base 10: mod_base = cm
  modified_base 11: mod_base = OTHER; note = 2-prime-fluorouridine
  modified_base 12: mod_base = OTHER; note = 2-prime-O-methyladenosine
  modified_base 13: mod_base = OTHER; note = 2-prime-fluoroadenosine
  modified_base 13..15: mod_base = OTHER; note = Phosphorothioate internucleotide linkage
  modified_base 14: mod_base = gm
  modified_base 15: mod_base = OTHER; note = 2-prime-fluoroadenosine
  source 1..15: mol_type = other RNA
cagttgtttctaaga

SEQ ID NO: 412 - RNA, 15 nt, synthetic construct
  misc_feature 1..15: note = Description of Artificial Sequence: Synthetic oligonucleotide
  modified_base 1..3: mod_base = OTHER; note = Phosphorothioate internucleotide linkage
  modified_base 2: mod_base = OTHER; note = 2-prime-O-methyladenosine
  modified_base 3: mod_base = OTHER; note = 2-prime-fluorocytidine
  modified_base 4: mod_base = gm
  modified_base 5: mod_base = OTHER; note = 2-prime-fluoroadenosine
  modified_base 6: mod_base = gm
  modified_base 6: mod_base = OTHER; note = 2-prime-fluoroguanosine
  modified_base 7: mod_base = OTHER; note = 2-prime-fluoroadenosine
  modified_base 8: mod_base = gm
  modified_base 8: mod_base = OTHER; note = 2-prime-fluoroguanosine
  modified_base 9: mod_base = OTHER; note = 2-prime-fluoroadenosine
  modified_base 10: mod_base = um
  modified_base 12: mod_base = um
  modified_base 13: mod_base = OTHER; note = 2-prime-fluoroadenosine
  modified_base 13..15: mod_base = OTHER; note = Phosphorothioate internucleotide linkage
  modified_base 14: mod_base = um
  modified_base 15: mod_base = OTHER; note = 2-prime-fluoroadenosine
  source 1..15: mol_type = other RNA
gacgagagatgtata

SEQ ID NO: 413 - RNA, 15 nt, synthetic construct
  misc_feature 1..15: note = Description of Artificial Sequence: Synthetic oligonucleotide
  modified_base 1: mod_base = OTHER; note = 2-prime-fluoroguanosine
  modified_base 1..3: mod_base = OTHER; note = Phosphorothioate internucleotide linkage
  modified_base 2: mod_base = OTHER; note = 2-prime-O-methyladenosine
  modified_base 3: mod_base = OTHER; note = 2-prime-fluoroguanosine
  modified_base 4: mod_base = OTHER; note = 2-prime-O-methyladenosine
  modified_base 5: mod_base = OTHER; note = 2-prime-fluorouridine
  modified_base 6: mod_base = gm
  modified_base 7: mod_base = OTHER; note = 2-prime-fluorouridine
  modified_base 8: mod_base = OTHER; note = 2-prime-O-methyladenosine
  modified_base 9: mod_base = OTHER; note = 2-prime-fluorouridine
  modified_base 10: mod_base = OTHER; note = 2-prime-O-methyladenosine
  modified_base 11: mod_base = OTHER; note = 2-prime-fluorouridine
  modified_base 12: mod_base = um
  modified_base 13: mod_base = OTHER; note = 2-prime-fluorouridine
  modified_base 13..15: mod_base = OTHER; note = Phosphorothioate internucleotide linkage
  modified_base 14: mod_base = OTHER; note = 2-prime-O-methyladenosine
  modified_base 15: mod_base = OTHER; note = 2-prime-fluoroadenosine
  source 1..15: mol_type = other RNA
gagatgtatatttaa

SEQ ID NO: 414 - RNA, 15 nt, synthetic construct
  misc_feature 1..15: note = Description of Artificial Sequence: Synthetic oligonucleotide
  modified_base 1: mod_base = OTHER; note = 2-prime-fluorouridine
  modified_base 1..3: mod_base = OTHER; note = Phosphorothioate internucleotide linkage
  modified_base 2: mod_base = OTHER; note = 2-prime-O-methyladenosine
  modified_base 3: mod_base = OTHER; note = 2-prime-fluoroadenosine
  modified_base 4: mod_base = cm
  modified_base 5: mod_base = OTHER; note = 2-prime-fluorouridine
  modified_base 6: mod_base = gm
  modified_base 7: mod_base = OTHER; note = 2-prime-fluorocytidine
  modified_base 8: mod_base = um
  modified_base 9: mod_base = OTHER; note = 2-prime-fluoroguanosine
  modified_base 10: mod_base = cm
  modified_base 11: mod_base = OTHER; note = 2-prime-fluoroadenosine
  modified_base 12: mod_base = OTHER; note = 2-prime-O-methyladenosine
  modified_base 13: mod_base = OTHER; note = 2-prime-fluoroadenosine
  modified_base 13..15: mod_base = OTHER; note = Phosphorothioate internucleotide linkage
  modified_base 14: mod_base = cm
  modified_base 15: mod_base = OTHER; note = 2-prime-fluoroadenosine
  source 1..15: mol_type = other RNA
taactgctgcaaaca

SEQ ID NO: 415 - RNA, 15 nt, synthetic construct
  misc_feature 1..15: note = Description of Artificial Sequence: Synthetic oligonucleotide
  modified_base 1: mod_base = OTHER; note = 2-prime-fluoroguanosine
  modified_base 1..3: mod_base = OTHER; note = Phosphorothioate internucleotide linkage
  modified_base 2: mod_base = cm
  modified_base 3: mod_base = OTHER; note = 2-prime-fluorouridine
  modified_base 4: mod_base = gm
  modified_base 5: mod_base = OTHER; note = 2-prime-fluorocytidine
  modified_base 6: mod_base = OTHER; note = 2-prime-O-methyladenosine
  modified_base 7: mod_base = OTHER; note = 2-prime-fluoroadenosine
  modified_base 8: mod_base = OTHER; note = 2-prime-O-methyladenosine
  modified_base 9: mod_base = OTHER; note = 2-prime-fluorocytidine
  modified_base 10: mod_base = OTHER; note = 2-prime-O-methyladenosine
  modified_base 11: mod_base = OTHER; note = 2-prime-fluorouridine
  modified_base 12: mod_base = um
  modified_base 13: mod_base = OTHER; note = 2-prime-fluoroguanosine
  modified_base 13..15: mod_base = OTHER; note = Phosphorothioate internucleotide linkage
  modified_base 14: mod_base = um
  modified_base 15: mod_base = OTHER; note = 2-prime-fluoroadenosine
  source 1..15: mol_type = other RNA
gctgcaaacattgta

SEQ ID NO: 416 - RNA, 20 nt, synthetic construct
  misc_feature 1..20: note = Description of Artificial Sequence: Synthetic oligonucleotide
  modified_base 1: mod_base = um
  modified_base 1..3: mod_base = OTHER; note = Phosphorothioate internucleotide linkage
  modified_base 2: mod_base = OTHER; note = 2-prime-fluorouridine
  modified_base 3: mod_base = um
  modified_base 4: mod_base = OTHER; note = 2-prime-fluorouridine
  modified_base 5: mod_base = OTHER; note = 2-prime-fluorocytidine
  modified_base 6: mod_base = OTHER; note = 2-prime-fluorouridine
  modified_base 7: mod_base = um
  modified_base 8: mod_base = OTHER; note = 2-prime-fluoroguanosine
  modified_base 9: mod_base = gm
  modified_base 10: mod_base = OTHER; note = 2-prime-fluorouridine
  modified_base 11: mod_base = gm
  modified_base 12: mod_base = OTHER; note = 2-prime-fluoroguanosine
  modified_base 13: mod_base = cm
  modified_base 13..20: mod_base = OTHER; note = Phosphorothioate internucleotide linkage
  modified_base 14: mod_base = OTHER; note = 2-prime-fluorouridine
  modified_base 15: mod_base = gm
  modified_base 16: mod_base = OTHER; note = 2-prime-fluoroadenosine
  modified_base 17: mod_base = gm
  modified_base 18: mod_base = OTHER; note = 2-prime-O-methyladenosine
  modified_base 19: mod_base = gm
  modified_base 20: mod_base = OTHER; note = 2-prime-fluorocytidine
  source 1..20: mol_type = other RNA
ttttcttggtggctgagagc

SEQ ID NO: 417 - RNA, 20 nt, synthetic construct
  misc_feature 1..20: note = Description of Artificial Sequence: Synthetic oligonucleotide
  modified_base 1: mod_base = um
  modified_base 1..3: mod_base = OTHER; note = Phosphorothioate internucleotide linkage
  modified_base 2: mod_base = OTHER; note = 2-prime-fluorouridine
  modified_base 3: mod_base = um
  modified_base 4: mod_base = OTHER; note = 2-prime-fluorocytidine
  modified_base 5: mod_base = OTHER; note = 2-prime-fluoroadenosine
  modified_base 6: mod_base = OTHER; note = 2-prime-fluoroguanosine
  modified_base 7: mod_base = OTHER; note = 2-prime-O-methyladenosine
  modified_base 8: mod_base = OTHER; note = 2-prime-fluoroadenosine
  modified_base 9: mod_base = cm
  modified_base 10: mod_base = OTHER; note = 2-prime-fluorouridine
  modified_base 11: mod_base = gm
  modified_base 12: mod_base = OTHER; note = 2-prime-fluorouridine
  modified_base 13: mod_base = cm
  modified_base 13..20: mod_base = OTHER; note = Phosphorothioate internucleotide linkage
  modified_base 14: mod_base = OTHER; note = 2-prime-fluoroguanosine
  modified_base 15: mod_base = gm
  modified_base 16: mod_base = OTHER; note = 2-prime-fluoroadenosine
  modified_base 17: mod_base = OTHER; note = 2-prime-O-methyladenosine
  modified_base 18..19: mod_base = gm
  modified_base 18..19: mod_base = OTHER; note = 2-prime-fluoroguanosine
  source 1..20: mol_type = other RNA
tttcagaactgtcggaaggg

SEQ ID NO: 418 - RNA, 20 nt, synthetic construct
  misc_feature 1..20: note = Description of Artificial Sequence: Synthetic oligonucleotide
  modified_base 1: mod_base = um
  modified_base 1..3: mod_base = OTHER; note = Phosphorothioate internucleotide linkage
  modified_base 2: mod_base = OTHER; note = 2-prime-fluorouridine
  modified_base 3: mod_base = um
  modified_base 4..5: mod_base = OTHER; note = 2-prime-fluorocytidine
  modified_base 6: mod_base = OTHER; note = 2-prime-fluorouridine
  modified_base 7: mod_base = gm
  modified_base 8: mod_base = OTHER; note = 2-prime-fluorouridine
  modified_base 9: mod_base = gm
  modified_base 10: mod_base = OTHER; note = 2-prime-fluorouridine
  modified_base 11: mod_base = OTHER; note = 2-prime-O-methyladenosine
  modified_base 12: mod_base = OTHER; note = 2-prime-fluorocytidine
  modified_base 13: mod_base = OTHER; note = 2-prime-O-methyladenosine
  modified_base 13..20: mod_base = OTHER; note = Phosphorothioate internucleotide linkage
  modified_base 14: mod_base = OTHER; note = 2-prime-fluorouridine
  modified_base 15: mod_base = gm
  modified_base 16: mod_base = OTHER; note = 2-prime-fluorocytidine
  modified_base 17: mod_base = OTHER; note = 2-prime-O-methyladenosine
  modified_base 18..19: mod_base = gm
  modified_base 20: mod_base = OTHER; note = 2-prime-fluorouridine
  source 1..20: mol_type = other RNA
tttcctgtgtacatgcaggt

SEQ ID NO: 419 - RNA, 20 nt, synthetic construct
  misc_feature 1..20: note = Description of Artificial Sequence: Synthetic oligonucleotide
  modified_base 1: mod_base = um
  modified_base 1..3: mod_base = OTHER; note = Phosphorothioate internucleotide linkage
  modified_base 2: mod_base = OTHER; note = 2-prime-fluorouridine
  modified_base 3: mod_base = um
  modified_base 4..5: mod_base = OTHER; note = 2-prime-fluorocytidine
  modified_base 6: mod_base = OTHER; note = 2-prime-fluorouridine
  modified_base 7: mod_base = um
  modified_base 8: mod_base = OTHER; note = 2-prime-fluoroguanosine
  modified_base 9: mod_base = um
  modified_base 10: mod_base = OTHER; note = 2-prime-fluoroadenosine
  modified_base 11: mod_base = gm
  modified_base 12: mod_base = OTHER; note = 2-prime-fluoroadenosine
  modified_base 12..20: mod_base = OTHER; note = Phosphorothioate internucleotide linkage
  modified_base 13: mod_base = gm
  modified_base 14: mod_base = OTHER; note = 2-prime-fluorouridine
  modified_base 15: mod_base = um
  modified_base 16: mod_base = OTHER; note = 2-prime-fluorocytidine
  modified_base 17: mod_base = um
  modified_base 18: mod_base = OTHER; note = 2-prime-O-methyladenosine
  modified_base 19: mod_base = gm
  modified_base 20: mod_base = OTHER; note = 2-prime-fluorocytidine
  source 1..20: mol_type = other RNA
tttccttgtagagttctagc

SEQ ID NO: 420 - RNA, 20 nt, synthetic construct
  misc_feature 1..20: note = Description of Artificial Sequence: Synthetic oligonucleotide
  modified_base 1: mod_base = um
  modified_base 1..3: mod_base = OTHER; note = Phosphorothioate internucleotide linkage
  modified_base 3: mod_base = um
  modified_base 6: mod_base = OTHER; note = 2-prime-fluorouridine
  modified_base 7: mod_base = gm
  modified_base 7: mod_base = OTHER; note = 2-prime-fluoroguanosine
  modified_base 9: mod_base = OTHER; note = 2-prime-O-methyladenosine
  modified_base 9: mod_base = OTHER; note = 2-prime-fluoroadenosine
  modified_base 10: mod_base = OTHER; note = 2-prime-fluorouridine
  modified_base 11: mod_base = gm
  modified_base 13: mod_base = gm
  modified_base 13..20: mod_base = OTHER; note = Phosphorothioate internucleotide linkage
  modified_base 14: mod_base = OTHER; note = 2-prime-fluorouridine
  modified_base 15: mod_base = cm
  modified_base 15: mod_base = cm
  modified_base 15: mod_base = OTHER; note = 2-prime-fluorocytidine
  modified_base 16: mod_base = OTHER; note = 2-prime-fluorouridine
  modified_base 17: mod_base = cm
  modified_base 17: mod_base = OTHER; note = 2-prime-fluorocytidine
  modified_base 18: mod_base = OTHER; note = 2-prime-fluoroadenosine
  modified_base 19: mod_base = gm
  modified_base 19: mod_base = OTHER; note = 2-prime-fluoroguanosine
  source 1..20: mol_type = other RNA
tgtactggatgagtctcagc

SEQ ID NO: 421 - RNA, 20 nt, synthetic construct
  misc_feature 1..20: note = Description of Artificial Sequence: Synthetic oligonucleotide
  modified_base 1: mod_base = um
  modified_base 1..3: mod_base = OTHER; note = Phosphorothioate internucleotide linkage
  modified_base 2: mod_base = OTHER; note = 2-prime-fluorouridine
  modified_base 3: mod_base = OTHER; note = 2-prime-O-methyladenosine
  modified_base 4: mod_base = OTHER; note = 2-prime-fluoroadenosine
  modified_base 5..6: mod_base = OTHER; note = 2-prime-fluorouridine
  modified_base 7: mod_base = um
  modified_base 8: mod_base = OTHER; note = 2-prime-fluorocytidine
  modified_base 9: mod_base = cm
  modified_base 10: mod_base = OTHER; note = 2-prime-fluorouridine
  modified_base 11: mod_base = um
  modified_base 12: mod_base = OTHER; note = 2-prime-fluoroguanosine
  modified_base 13: mod_base = um
  modified_base 13..20: mod_base = OTHER; note = Phosphorothioate internucleotide linkage
  modified_base 14: mod_base = OTHER; note = 2-prime-fluoroadenosine
  modified_base 15: mod_base = gm
  modified_base 16: mod_base = OTHER; note = 2-prime-fluoroadenosine
  modified_base 17: mod_base = gm
  modified_base 18..19: mod_base = um
  modified_base 20: mod_base = OTHER; note = 2-prime-fluorocytidine
  source 1..20: mol_type = other RNA
ttaatttccttgtagagttc

SEQ ID NO: 422 - RNA, 20 nt, synthetic construct
  misc_feature 1..20: note = Description of Artificial Sequence: Synthetic oligonucleotide
  modified_base 1: mod_base = um
  modified_base 1..3: mod_base = OTHER; note = Phosphorothioate internucleotide linkage
  modified_base 2: mod_base = OTHER; note = 2-prime-fluoroguanosine
  modified_base 3: mod_base = um
  modified_base 4: mod_base = OTHER; note = 2-prime-fluoroadenosine
  modified_base 5..6: mod_base = OTHER; note = 2-prime-fluorouridine
  modified_base 7: mod_base = cm
  modified_base 8: mod_base = OTHER; note = 2-prime-fluoroadenosine
  modified_base 9: mod_base = OTHER; note = 2-prime-O-methyladenosine
  modified_base 10: mod_base = OTHER; note = 2-prime-fluoroadenosine
  modified_base 11: mod_base = cm
  modified_base 12: mod_base = OTHER; note = 2-prime-fluorouridine
  modified_base 13: mod_base = gm
  modified_base 13..20: mod_base = OTHER; note = Phosphorothioate internucleotide linkage
  modified_base 14: mod_base = OTHER; note = 2-prime-fluorocytidine
  modified_base 15: mod_base = um
  modified_base 16: mod_base = OTHER; note = 2-prime-fluorouridine
  modified_base 17: mod_base = cm
  modified_base 18: mod_base = OTHER; note = 2-prime-O-methyladenosine
  modified_base 19: mod_base = gm
  modified_base 20: mod_base = OTHER; note = 2-prime-fluorocytidine
  source 1..20: mol_type = other RNA
tgtattcaaactgcttcagc

SEQ ID NO: 423 - RNA, 20 nt, synthetic construct
  misc_feature 1..20: note = Description of Artificial Sequence: Synthetic oligonucleotide
  modified_base 1: mod_base = um
  modified_base 1..3: mod_base = OTHER; note = Phosphorothioate internucleotide linkage
  modified_base 2: mod_base = OTHER; note = 2-prime-fluorouridine
  modified_base 3: mod_base = gm
  modified_base 4: mod_base = OTHER; note = 2-prime-fluorouridine
  modified_base 5: mod_base = OTHER; note = 2-prime-fluoroadenosine
  modified_base 6: mod_base = OTHER; note = 2-prime-fluoroguanosine
  modified_base 7: mod_base = OTHER; note = 2-prime-O-methyladenosine
  modified_base 8: mod_base = OTHER; note = 2-prime-fluoroguanosine
  modified_base 9: mod_base = um
  modified_base 10: mod_base = OTHER; note = 2-prime-fluorouridine
  modified_base 11: mod_base = um
  modified_base 12: mod_base = OTHER; note = 2-prime-fluoroguanosine
  modified_base 13: mod_base = cm
  modified_base 13..20: mod_base = OTHER; note = Phosphorothioate internucleotide linkage
  modified_base 14: mod_base = OTHER; note = 2-prime-fluorouridine
  modified_base 15: mod_base = gm
  modified_base 16: mod_base = OTHER; note = 2-prime-fluoroadenosine
  modified_base 17: mod_base = OTHER; note = 2-prime-O-methyladenosine
  modified_base 18: mod_base = gm
  modified_base 19: mod_base = OTHER; note = 2-prime-O-methyladenosine
  modified_base 20: mod_base = OTHER; note = 2-prime-fluoroadenosine
  source 1..20: mol_type = other RNA
ttgtagagtttgctgaagaa

SEQ ID NO: 424 - RNA, 20 nt, synthetic construct
  misc_feature 1..20: note = Description of Artificial Sequence: Synthetic oligonucleotide
  modified_base 1: mod_base = um
  modified_base 1..3: mod_base = OTHER; note = Phosphorothioate internucleotide linkage
  modified_base 2: mod_base = OTHER; note = 2-prime-fluorouridine
  modified_base 3: mod_base = um
  modified_base 4: mod_base = OTHER; note = 2-prime-fluorouridine
  modified_base 5: mod_base = OTHER; note = 2-prime-fluorocytidine
  modified_base 6: mod_base = OTHER; note = 2-prime-fluorouridine
  modified_base 7: mod_base = cm
  modified_base 8: mod_base = OTHER; note = 2-prime-fluorocytidine
  modified_base 9: mod_base = um
  modified_base 10: mod_base = OTHER; note = 2-prime-fluorouridine
  modified_base 11: mod_base = um
  modified_base 12: mod_base = OTHER; note = 2-prime-fluorocytidine
  modified_base 13: mod_base = cm
  modified_base 13..20: mod_base = OTHER; note = Phosphorothioate internucleotide linkage
  modified_base 14: mod_base = OTHER; note = 2-prime-fluorouridine
  modified_base 15: mod_base = gm
  modified_base 16: mod_base = OTHER; note = 2-prime-fluorouridine
  modified_base 17: mod_base = gm
  modified_base 18: mod_base = um
  modified_base 19: mod_base = OTHER; note = 2-prime-O-methyladenosine
  modified_base 20: mod_base = OTHER; note = 2-prime-fluorocytidine
  source 1..20: mol_type = other RNA
ttttctcctttcctgtgtac

SEQ ID NO: 425 - RNA, 20 nt, synthetic construct
  misc_feature 1..20: note = Description of Artificial Sequence: Synthetic oligonucleotide
  modified_base 1: mod_base = um
  modified_base 1..3: mod_base = OTHER; note = Phosphorothioate internucleotide linkage
  modified_base 2: mod_base = OTHER; note = 2-prime-fluorouridine
  modified_base 3: mod_base = um
  modified_base 4: mod_base = OTHER; note = 2-prime-fluorocytidine
  modified_base 5: mod_base = OTHER; note = 2-prime-fluorouridine
  modified_base 6: mod_base = OTHER; note = fluoroguanosine
  modified_base 7: mod_base = cm
  modified_base 8: mod_base = OTHER; note = 2-prime-fluoroadenosine
  modified_base 9: mod_base = gm
  modified_base 10: mod_base = OTHER; note = 2-prime-fluorocytidine
  modified_base 11: mod_base = OTHER; note = 2-prime-O-methyladenosine
  modified_base 12: mod_base = OTHER; note = fluoroguanosine
  modified_base 13: mod_base = gm
  modified_base 13..20: mod_base = OTHER; note = Phosphorothioate internucleotide linkage
  modified_base 14: mod_base = OTHER; note = fluoroguanosine
  modified_base 15: mod_base = gm
  modified_base 16: mod_base = OTHER; note = 2-prime-fluoroadenosine
  modified_base 17: mod_base = OTHER; note = 2-prime-O-methyladenosine
  modified_base 18: mod_base = um
  modified_base 19: mod_base = gm
  modified_base 20: mod_base = OTHER; note = 2-prime-fluorocytidine
  source 1..20: mol_type = other RNA
tttctgcagcaggggaatgc

SEQ ID NO: 426 - RNA, 20 nt, synthetic construct
  misc_feature 1..20: note = Description of Artificial Sequence: Synthetic oligonucleotide
  modified_base 1: mod_base = um
  modified_base 1..3: mod_base = OTHER; note = Phosphorothioate internucleotide linkage
  modified_base 2: mod_base = OTHER; note = 2-prime-fluoroguanosine
  modified_base 3: mod_base = um
  modified_base 4: mod_base = OTHER; note = 2-prime-fluoroguanosine
  modified_base 5: mod_base = OTHER; note = 2-prime-fluoroadenosine
  modified_base 6: mod_base = OTHER; note = 2-prime-fluorouridine
  modified_base 7: mod_base = gm
  modified_base 8: mod_base = OTHER; note = 2-prime-fluorocytidine
  modified_base 9: mod_base = um
  modified_base 10: mod_base = OTHER; note = 2-prime-fluorouridine
  modified_base 11: mod_base = gm
  modified_base 12: mod_base = OTHER; note = 2-prime-fluoroguanosine
  modified_base 13: mod_base = um
  modified_base 13..20: mod_base = OTHER; note = Phosphorothioate internucleotide linkage
  modified_base 14: mod_base = OTHER; note = 2-prime-fluoroadenosine
  modified_base 15: mod_base = gm
  modified_base 16: mod_base = OTHER; note = 2-prime-fluorocytidine
  modified_base 17: mod_base = OTHER; note = 2-prime-O-methyladenosine
  modified_base 18..19: mod_base = gm
  modified_base 18: mod_base = OTHER; note = 2-prime-fluoroguanosine
  modified_base 20: mod_base = OTHER; note = 2-prime-fluorouridine
  source 1..20: mol_type = other RNA
tgtgatgcttggtagcaggt

SEQ ID NO: 427 - RNA, 20 nt, synthetic construct
  misc_feature 1..20: note = Description of Artificial Sequence: Synthetic oligonucleotide
  modified_base 1: mod_base = um
  modified_base 1..3: mod_base = OTHER; note = Phosphorothioate internucleotide linkage
  modified_base 2: mod_base = OTHER; note = 2-prime-fluorouridine
  modified_base 3: mod_base = cm
  modified_base 4: mod_base = OTHER; note = 2-prime-fluoroguanosine
  modified_base 5: mod_base = OTHER; note = 2-prime-fluorocytidine
  modified_base 6: mod_base = OTHER; note = 2-prime-fluoroadenosine
  modified_base 7: mod_base = OTHER; note = 2-prime-O-methyladenosine
  modified_base 8: mod_base = OTHER; note = 2-prime-fluoroadenosine
  modified_base 9: mod_base = gm
  modified_base 10: mod_base = OTHER; note = 2-prime-fluorouridine
  modified_base 11: mod_base = um
  modified_base 12: mod_base = OTHER; note = 2-prime-fluoroguanosine
  modified_base 13: mod_base = cm
  modified_base 13..20: mod_base = OTHER; note = Phosphorothioate internucleotide linkage
  modified_base 14: mod_base = OTHER; note = 2-prime-fluorocytidine
  modified_base 15: mod_base = OTHER; note = 2-prime-O-methyladenosine
  modified_base 16: mod_base = OTHER; note = 2-prime-fluoroadenosine
  modified_base 17..18: mod_base = OTHER; note = 2-prime-O-methyladenosine
  modified_base 19: mod_base = gm
  modified_base 20: mod_base = OTHER; note = 2-prime-fluoroadenosine
  source 1..20: mol_type = other RNA
ttcgcaaagttgccaaaaga

SEQ ID NO: 428 - RNA, 20 nt, synthetic construct
  misc_feature 1..20: note = Description of Artificial Sequence: Synthetic oligonucleotide
  modified_base 1: mod_base = um
  modified_base 1..3: mod_base = OTHER; note = Phosphorothioate internucleotide linkage
  modified_base 2: mod_base = OTHER; note = 2-prime-fluorocytidine
  modified_base 3: mod_base = um
  modified_base 4: mod_base = OTHER; note = 2-prime-fluorouridine
  modified_base 5: mod_base = OTHER; note = 2-prime-fluoroguanosine
  modified_base 6: mod_base = OTHER; note = 2-prime-fluorouridine
  modified_base 7: mod_base = cm
  modified_base 8: mod_base = OTHER; note = 2-prime-fluorouridine
  modified_base 9: mod_base = gm
  modified_base 10: mod_base = OTHER; note = 2-prime-fluorocytidine
  modified_base 11: mod_base = um
  modified_base 12: mod_base = OTHER; note = 2-prime-fluorocytidine
  modified_base 13: mod_base = gm
  modified_base 13..20: mod_base = OTHER; note = Phosphorothioate internucleotide linkage
  modified_base 14: mod_base = OTHER; note = 2-prime-fluoroguanosine
  modified_base 15: mod_base = um
  modified_base 16: mod_base = OTHER; note = 2-prime-fluorouridine
  modified_base 17: mod_base = cm
  modified_base 18..19: mod_base = um
  modified_base 20: mod_base = OTHER; note = 2-prime-fluorouridine
  source 1..20: mol_type = other RNA
tcttgtctgctcggttcttt

SEQ ID NO: 429 - RNA, 20 nt, synthetic construct
  misc_feature 1..20: note = Description of Artificial Sequence: Synthetic oligonucleotide
  modified_base 1: mod_base = um
  modified_base 1..3: mod_base = OTHER; note = Phosphorothioate internucleotide linkage
  modified_base 2: mod_base = OTHER; note = 2-prime-fluoroadenosine
  modified_base 3: mod_base = um
  modified_base 4: mod_base = OTHER; note = 2-prime-fluorouridine
  modified_base 5: mod_base = OTHER; note = 2-prime-fluoroguanosine
  modified_base 6: mod_base = OTHER; note = 2-prime-fluorouridine
  modified_base 7: mod_base = cm
  modified_base 8: mod_base = OTHER; note = 2-prime-fluoroguanosine
  modified_base 9: mod_base = um
  modified_base 10: mod_base = OTHER; note = 2-prime-fluorouridine
  modified_base 11: mod_base = cm
  modified_base 12: mod_base = OTHER; note = 2-prime-fluoroguanosine
  modified_base 13: mod_base = cm
  modified_base 13..20: mod_base = OTHER; note = Phosphorothioate internucleotide linkage
  modified_base 14: mod_base = OTHER; note = 2-prime-fluoroadenosine
  modified_base 15: mod_base = OTHER; note = 2-prime-O-methyladenosine
  modified_base 16: mod_base = OTHER; note = 2-prime-fluoroadenosine
  modified_base 17: mod_base = gm
  modified_base 18..19: mod_base = um
  modified_base 20: mod_base = OTHER; note = 2-prime-fluoroguanosine
  source 1..20: mol_type = other RNA
tattgtcgttcgcaaagttg

SEQ ID NO: 430 - RNA, 20 nt, synthetic construct
  misc_feature 1..20: note = Description of Artificial Sequence: Synthetic oligonucleotide
  modified_base 1: mod_base = um
  modified_base 1..3: mod_base = OTHER; note = Phosphorothioate internucleotide linkage
  modified_base 2: mod_base = OTHER; note = 2-prime-fluoroguanosine
  modified_base 3: mod_base = um
  modified_base 4..5: mod_base = OTHER; note = 2-prime-fluorouridine
  modified_base 6: mod_base = OTHER; note = 2-prime-fluoroguanosine
  modified_base 7: mod_base = gm
  modified_base 8: mod_base = OTHER; note = 2-prime-fluoroguanosine
  modified_base 9: mod_base = OTHER; note = 2-prime-O-methyladenosine
  modified_base 9: mod_base = OTHER; note = 2-prime-fluoroadenosine
  modified_base 10: mod_base = OTHER; note = 2-prime-fluorouridine
  modified_base 11: mod_base = OTHER; note = 2-prime-O-methyladenosine
  modified_base 12: mod_base = OTHER; note = 2-prime-fluoroadenosine
  modified_base 13: mod_base = um
  modified_base 13..20: mod_base = OTHER; note = Phosphorothioate internucleotide linkage
  modified_base 14: mod_base = OTHER; note = 2-prime-fluorocytidine
  modified_base 15: mod_base = gm
  modified_base 16: mod_base = OTHER; note = 2-prime-fluorocytidine
  modified_base 17: mod_base = cm
  modified_base 18: mod_base = um
  modified_base 19: mod_base = cm
  modified_base 20: mod_base = OTHER; note = 2-prime-fluorouridine
  source 1..20: mol_type = other RNA
tgtttgggataatcgcctct

SEQ ID NO: 431 - RNA, 20 nt, synthetic construct
  misc_feature 1..20: note = Description of Artificial Sequence: Synthetic oligonucleotide
  modified_base 1: mod_base = um
  modified_base 1..3: mod_base = OTHER; note = Phosphorothioate internucleotide linkage
  modified_base 2: mod_base = OTHER; note = 2-prime-fluorocytidine
  modified_base 3: mod_base = um
  modified_base 4: mod_base = OTHER; note = 2-prime-fluoroguanosine
  modified_base 5: mod_base = OTHER; note = 2-prime-fluorouridine
  modified_base 6: mod_base = OTHER; note = 2-prime-fluoroadenosine
  modified_base 7: mod_base = um
  modified_base 8: mod_base = OTHER; note = 2-prime-fluoroguanosine
  modified_base 9: mod_base = OTHER; note = 2-prime-O-methyladenosine
  modified_base 10: mod_base = OTHER; note = 2-prime-fluorouridine
  modified_base 11: mod_base = gm
  modified_base 12: mod_base = OTHER; note = 2-prime-fluoroguanosine
  modified_base 13: mod_base = OTHER; note = 2-prime-O-methyladenosine
  modified_base 13..20: mod_base = OTHER; note = Phosphorothioate internucleotide linkage
  modified_base 14: mod_base = OTHER; note = 2-prime-fluoroguanosine
  modified_base 15: mod_base = gm
  modified_base 16: mod_base = OTHER; note = 2-prime-fluorocytidine
  modified_base 17: mod_base = cm
  modified_base 18: mod_base = gm
  modified_base 19: mod_base = OTHER; note = 2-prime-O-methyladenosine
  modified_base 20: mod_base = OTHER; note = 2-prime-fluoroguanosine
  source 1..20: mol_type = other RNA
tctgtatgatggaggccgag

SEQ ID NO: 432 - RNA, 20 nt, synthetic construct
  misc_feature 1..20: note = Description of Artificial Sequence: Synthetic oligonucleotide
  modified_base 1: mod_base = um
  modified_base 1..3: mod_base = OTHER; note = Phosphorothioate internucleotide linkage
  modified_base 2: mod_base = OTHER; note = 2-prime-fluoroguanosine
  modified_base 3: mod_base = um
  modified_base 4: mod_base = OTHER; note = 2-prime-fluoroadenosine
  modified_base 5..6: mod_base = OTHER; note = 2-prime-fluorocytidine
  modified_base 7: mod_base = cm
  modified_base 8: mod_base = OTHER; note = 2-prime-fluoroguanosine
  modified_base 9: mod_base = cm
  modified_base 10: mod_base = OTHER; note = 2-prime-fluorouridine
  modified_base 11: mod_base = cm
  modified_base 12: mod_base = OTHER; note = 2-prime-fluorouridine
  modified_base 13: mod_base = um
  modified_base 13..20: mod_base = OTHER; note = Phosphorothioate internucleotide linkage
  modified_base 14: mod_base = OTHER; note = 2-prime-fluoroguanosine
  modified_base 15: mod_base = cm
  modified_base 16: mod_base = OTHER; note = 2-prime-fluoroadenosine
  modified_base 17: mod_base = gm
  modified_base 18: mod_base = cm
  modified_base 19: mod_base = um
  modified_base 20: mod_base = OTHER; note = 2-prime-fluorouridine
  source 1..20: mol_type = other RNA
tgtacccgctcttgcagctt

SEQ ID NO: 433 - RNA, 20 nt, synthetic construct
  misc_feature 1..20: note = Description of Artificial Sequence: Synthetic oligonucleotide
  modified_base 1: mod_base = um
  modified_base 1..3: mod_base = OTHER; note = Phosphorothioate internucleotide linkage
  modified_base 2: mod_base = OTHER; note = 2-prime-fluorouridine
  modified_base 3: mod_base = um
  modified_base 4..5: mod_base = OTHER; note = 2-prime-fluorocytidine
  modified_base 6: mod_base = OTHER; note = 2-prime-fluorouridine
  modified_base 7: mod_base = gm
  modified_base 8: mod_base = OTHER; note = 2-prime-fluorocytidine
  modified_base 9: mod_base = OTHER; note = 2-prime-O-methyladenosine
  modified_base 10: mod_base = OTHER; note = 2-prime-fluorouridine
  modified_base 11: mod_base = cm
  modified_base 12: mod_base = OTHER; note = 2-prime-fluoroadenosine
  modified_base 13: mod_base = gm
  modified_base 13..20: mod_base = OTHER; note = Phosphorothioate internucleotide linkage
  modified_base 14: mod_base = OTHER; note = 2-prime-fluorocytidine
  modified_base 15: mod_base = cm
  modified_base 16: mod_base = OTHER; note = 2-prime-fluorouridine
  modified_base 17: mod_base = um
  modified_base 18: mod_base = OTHER; note = 2-prime-O-methyladenosine
  modified_base 19: mod_base = um
  modified_base 20: mod_base = OTHER; note = 2-prime-fluorouridine
  source 1..20: mol_type = other RNA
tttcctgcatcagccttatt

SEQ ID NO: 434 - RNA, 20 nt, synthetic construct
  misc_feature 1..20: note = Description of Artificial Sequence: Synthetic oligonucleotide
  modified_base 1: mod_base = um
  modified_base 1..3: mod_base = OTHER; note = Phosphorothioate internucleotide linkage
  modified_base 2: mod_base = OTHER; note = 2-prime-fluoroadenosine
  modified_base 3: mod_base = gm
  modified_base 4: mod_base = OTHER; note = 2-prime-fluoroadenosine
  modified_base 5: mod_base = OTHER; note = 2-prime-fluoroguanosine
  modified_base 6: mod_base = OTHER; note = 2-prime-fluorouridine
  modified_base 7: mod_base = cm
  modified_base 8: mod_base = OTHER; note = 2-prime-fluorocytidine
  modified_base 9: mod_base = OTHER; note = 2-prime-O-methyladenosine
  modified_base 10: mod_base = OTHER; note = 2-prime-fluorouridine
  modified_base 11: mod_base = cm
  modified_base 12: mod_base = OTHER; note = 2-prime-fluoroadenosine
  modified_base 13: mod_base = OTHER; note = 2-prime-O-methyladenosine
  modified_base 13..20: mod_base = OTHER; note = Phosphorothioate internucleotide linkage
  modified_base 14: mod_base = OTHER; note = 2-prime-fluoroadenosine
  modified_base 15: mod_base = gm
  modified_base 16: mod_base = OTHER; note = 2-prime-fluorocytidine
  modified_base 17..19: mod_base = um
  modified_base 20: mod_base = OTHER; note = 2-prime-fluorouridine
  source 1..20: mol_type = other RNA
tagagtccatcaaagctttt

SEQ ID NO: 435 - RNA, 20 nt, synthetic construct
  misc_feature 1..20: note = Description of Artificial Sequence: Synthetic oligonucleotide
  modified_base 1: mod_base = um
  modified_base 1..3: mod_base = OTHER; note = Phosphorothioate internucleotide linkage
  modified_base 2: mod_base = OTHER; note = 2-prime-fluoroadenosine
  modified_base 3: mod_base = OTHER; note = 2-prime-O-methyladenosine
  modified_base 4: mod_base = OTHER; note = 2-prime-fluoroadenosine
  modified_base 5: mod_base = OTHER; note = 2-prime-fluoroguanosine
  modified_base 6: mod_base = OTHER; note = 2-prime-fluorouridine
  modified_base 7: mod_base = um
  modified_base 8: mod_base = OTHER; note = 2-prime-fluorocytidine
  modified_base 9: mod_base = cm
  modified_base 10: mod_base = OTHER; note = 2-prime-fluoroadenosine
  modified_base 11: mod_base = um
  modified_base 12: mod_base = OTHER; note = 2-prime-fluoroadenosine
  modified_base 13: mod_base = gm
  modified_base 13..20: mod_base = OTHER; note = Phosphorothioate internucleotide linkage
  modified_base 14: mod_base = OTHER; note = 2-prime-fluorocytidine
  modified_base 15: mod_base = gm
  modified_base 16: mod_base = OTHER; note = 2-prime-fluoroadenosine
  modified_base 17: mod_base = um
  modified_base 18: mod_base = gm
  modified_base 19: mod_base = cm
  modified_base 20: mod_base = OTHER; note = 2-prime-fluorocytidine
  source 1..20: mol_type = other RNA
taaagttccatagcgatgcc

SEQ ID NO: 436 - RNA, 20 nt, synthetic construct
  misc_feature 1..20: note = Description of Artificial Sequence: Synthetic oligonucleotide
  modified_base 1: mod_base = um
  modified_base 1..3: mod_base = OTHER; note = Phosphorothioate internucleotide linkage
  modified_base 2: mod_base = OTHER; note = 2-prime-fluorouridine
  modified_base 3: mod_base = um
  modified_base 4: mod_base = OTHER; note = 2-prime-fluorouridine
  modified_base 5: mod_base = OTHER; note = 2-prime-fluorocytidine
  modified_base 6: mod_base = OTHER; note = 2-prime-fluorouridine
  modified_base 7: mod_base = um
  modified_base 8: mod_base = OTHER; note = 2-prime-fluoroguanosine
  modified_base 9: mod_base = OTHER; note = 2-prime-O-methyladenosine
  modified_base 10: mod_base = OTHER; note = 2-prime-fluoroadenosine
  modified_base 11: mod_base = OTHER; note = 2-prime-O-methyladenosine
  modified_base 12: mod_base = OTHER; note = 2-prime-fluoroguanosine
  modified_base 13: mod_base = gm
  modified_base 13..20: mod_base = OTHER; note = Phosphorothioate internucleotide linkage
  modified_base 14: mod_base = OTHER; note = 2-prime-fluoroadenosine
  modified_base 15: mod_base = cm
  modified_base 16: mod_base = OTHER; note = 2-prime-fluoroadenosine
  modified_base 17..19: mod_base = gm
  modified_base 20: mod_base = OTHER; note = 2-prime-fluorocytidine
  source 1..20: mol_type = other RNA
ttttcttgaaaggacagggc

SEQ ID NO: 437 - RNA, 20 nt, synthetic construct
  misc_feature 1..20: note = Description of Artificial Sequence: Synthetic oligonucleotide
  modified_base 1: mod_base = um
  modified_base 1..3: mod_base = OTHER; note = Phosphorothioate internucleotide linkage
  modified_base 2: mod_base = OTHER; note = 2-prime-fluorouridine
  modified_base 3: mod_base = cm
  modified_base 4: mod_base = OTHER; note = 2-prime-fluoroadenosine
  modified_base 5: mod_base = OTHER; note = 2-prime-fluoroguanosine
  modified_base 6: mod_base = OTHER; note = 2-prime-fluorouridine
  modified_base 7: mod_base = gm
  modified_base 8: mod_base = OTHER; note = 2-prime-fluorocytidine
  modified_base 9: mod_base = um
  modified_base 10: mod_base = OTHER; note = 2-prime-fluorouridine
  modified_base 11: mod_base = um
  modified_base 12: mod_base = OTHER; note = 2-prime-fluorouridine
  modified_base 13: mod_base = OTHER; note = 2-prime-O-methyladenosine
  modified_base 13..20: mod_base = OTHER; note = Phosphorothioate internucleotide linkage
  modified_base 14: mod_base = OTHER; note = 2-prime-fluorouridine
  modified_base 15: mod_base = gm
  modified_base 16: mod_base = OTHER; note = 2-prime-fluoroadenosine
  modified_base 17: mod_base = cm
  modified_base 18: mod_base = gm
  modified_base 19: mod_base = OTHER; note = 2-prime-O-methyladenosine
  modified_base 20: mod_base = OTHER; note = 2-prime-fluoroguanosine
  source 1..20: mol_type = other RNA
ttcagtgcttttatgacgag

SEQ ID NO: 438 - RNA, 20 nt, synthetic construct
  misc_feature 1..20: note = Description of Artificial Sequence: Synthetic oligonucleotide
  modified_base 1: mod_base = um
  modified_base 1..3: mod_base = OTHER; note = Phosphorothioate internucleotide linkage
  modified_base 2: mod_base = OTHER; note = 2-prime-fluorocytidine
  modified_base 3: mod_base = OTHER; note = 2-prime-O-methyladenosine
  modified_base 4..5: mod_base = OTHER; note = 2-prime-fluoroguanosine
  modified_base 6: mod_base = OTHER; note = 2-prime-fluorouridine
  modified_base 7: mod_base = um
  modified_base 8: mod_base = OTHER; note = 2-prime-fluoroguanosine
  modified_base 9: mod_base = OTHER; note = 2-prime-O-methyladenosine
  modified_base 10: mod_base = OTHER; note = 2-prime-fluoroadenosine
  modified_base 11: mod_base = cm
  modified_base 12: mod_base = OTHER; note = 2-prime-fluorouridine
  modified_base 13: mod_base = cm
  modified_base 13..20: mod_base = OTHER; note = Phosphorothioate internucleotide linkage
  modified_base 14: mod_base = OTHER; note = 2-prime-fluorocytidine
  modified_base 15: mod_base = gm
  modified_base 16: mod_base = OTHER; note = 2-prime-fluoroadenosine
  modified_base 17: mod_base = gm
  modified_base 18: mod_base = um
  modified_base 19: mod_base = gm
  modified_base 20: mod_base = OTHER; note = 2-prime-fluorocytidine
  source 1..20: mol_type = other RNA
tcaggttgaactccgagtgc

SEQ ID NO: 439 - RNA, 20 nt, synthetic construct
  misc_feature 1..20: note = Description of Artificial Sequence: Synthetic oligonucleotide
  modified_base 1: mod_base = um
  modified_base 1..3: mod_base = OTHER; note = Phosphorothioate internucleotide linkage
  modified_base 2: mod_base = OTHER; note = 2-prime-fluorouridine
  modified_base 3: mod_base = cm
  modified_base 4..5: mod_base = OTHER; note = 2-prime-fluorocytidine
  modified_base 6: mod_base = OTHER; note = 2-prime-fluoroadenosine
  modified_base 7: mod_base = OTHER; note = 2-prime-O-methyladenosine
  modified_base 8: mod_base = OTHER; note = 2-prime-fluorouridine
  modified_base 9: mod_base = gm
  modified_base 10: mod_base = OTHER; note = 2-prime-fluorouridine
  modified_base 11: mod_base = cm
  modified_base 12: mod_base = OTHER; note = 2-prime-fluorocytidine
  modified_base 13: mod_base = um
  modified_base 13..20: mod_base = OTHER; note = Phosphorothioate internucleotide linkage
  modified_base 14: mod_base = OTHER; note = 2-prime-fluoroguanosine
  modified_base 15: mod_base = cm
  modified_base 16: mod_base = OTHER; note = 2-prime-fluoroadenosine
  modified_base 17: mod_base = gm
  modified_base 18: mod_base = cm
  modified_base 19: mod_base = gm
  modified_base 20: mod_base = OTHER; note = 2-prime-fluorouridine
  source 1..20: mol_type = other RNA
ttcccaatgtcctgcagcgt

SEQ ID NO: 440 - RNA, 20 nt, synthetic construct
  misc_feature 1..20: note = Description of Artificial Sequence: Synthetic oligonucleotide
  modified_base 1: mod_base = um
  modified_base 1..3: mod_base = OTHER; note = Phosphorothioate internucleotide linkage
  modified_base 2: mod_base = OTHER; note = 2-prime-fluorouridine
  modified_base 3: mod_base = um
  modified_base 4: mod_base = OTHER; note = 2-prime-fluorouridine
  modified_base 5: mod_base = OTHER; note = 2-prime-fluoroguanosine
  modified_base 6: mod_base = OTHER; note = 2-prime-fluorouridine
  modified_base 7: mod_base = um
  modified_base 8: mod_base = OTHER; note = 2-prime-fluorouridine
  modified_base 9: mod_base = um
  modified_base 10: mod_base = OTHER; note = 2-prime-fluorocytidine
  modified_base 11: mod_base = um
  modified_base 12: mod_base = OTHER; note = 2-prime-fluorouridine
  modified_base 13: mod_base = gm
  modified_base 13..20: mod_base = OTHER; note = Phosphorothioate internucleotide linkage
  modified_base 14: mod_base = OTHER; note = 2-prime-fluoroadenosine
  modified_base 15: mod_base = OTHER; note = 2-prime-O-methyladenosine
  modified_base 16: mod_base = OTHER; note = 2-prime-fluoroadenosine
  modified_base 17..18: mod_base = gm
  modified_base 19: mod_base = OTHER; note = 2-prime-O-methyladenosine
  modified_base 20: mod_base = OTHER; note = 2-prime-fluorocytidine
  source 1..20: mol_type = other RNA
ttttgttttcttgaaaggac

SEQ ID NO: 441 - RNA, 20 nt, synthetic construct
  misc_feature 1..20: note = Description of Artificial Sequence: Synthetic oligonucleotide
  modified_base 1: mod_base = um
  modified_base 1..3: mod_base = OTHER; note = Phosphorothioate internucleotide linkage
  modified_base 2: mod_base = OTHER; note = 2-prime-fluorouridine
  modified_base 3: mod_base = um
  modified_base 4..5: mod_base = OTHER; note = 2-prime-fluoroadenosine
  modified_base 6: mod_base = OTHER; note = 2-prime-fluorouridine
  modified_base 7: mod_base = cm
  modified_base 8: mod_base = OTHER; note = 2-prime-fluorouridine
  modified_base 9: mod_base = cm
  modified_base 10: mod_base = OTHER; note = 2-prime-fluoroadenosine
  modified_base 11: mod_base = um
  modified_base 12: mod_base = OTHER; note = 2-prime-fluorouridine
  modified_base 13: mod_base = gm
  modified_base 13..20: mod_base = OTHER; note = Phosphorothioate internucleotide linkage
  modified_base 14: mod_base = OTHER; note = 2-prime-fluorouridine
  modified_base 15: mod_base = cm
  modified_base 16: mod_base = OTHER; note = 2-prime-fluoroguanosine
  modified_base 17..18: mod_base = um
  modified_base 19: mod_base = cm
  modified_base 20: mod_base = OTHER; note = 2-prime-fluoroguanosine
  source 1..20: mol_type = other RNA
tttaatctcattgtcgttcg

SEQ ID NO: 442 - RNA, 20 nt, synthetic construct
  misc_feature 1..20: note = Description of Artificial Sequence: Synthetic oligonucleotide
  modified_base 1: mod_base = um
  modified_base 1..3: mod_base = OTHER; note = Phosphorothioate internucleotide linkage
  modified_base 2: mod_base = OTHER; note = 2-prime-fluoroguanosine
  modified_base 3: mod_base = cm
  modified_base 4: mod_base = OTHER; note = 2-prime-fluoroadenosine
  modified_base 5: mod_base = OTHER; note = 2-prime-fluoroguanosine
  modified_base 6: mod_base = OTHER; note = 2-prime-fluorouridine
  modified_base 7: mod_base = cm
  modified_base 8: mod_base = OTHER; note = 2-prime-fluorocytidine
  modified_base 9: mod_base = gm
  modified_base 10: mod_base = OTHER; note = 2-prime-fluorocytidine
  modified_base 11: mod_base = cm
  modified_base 12: mod_base = OTHER; note = 2-prime-fluoroadenosine
  modified_base 13: mod_base = gm
  modified_base 13..20: mod_base = OTHER; note = Phosphorothioate internucleotide linkage
  modified_base 14: mod_base = OTHER; note = 2-prime-fluoroadenosine
  modified_base 15: mod_base = gm
  modified_base 16: mod_base = OTHER; note = 2-prime-fluoroadenosine
  modified_base 17..19: mod_base = OTHER; note = 2-prime-O-methyladenosine
  modified_base 20: mod_base = OTHER; note = 2-prime-fluorouridine
  source 1..20: mol_type = other RNA
tgcagtccgccagagaaaat

SEQ ID NO: 443 - RNA, 20 nt, synthetic construct
  misc_feature 1..20: note = Description of Artificial Sequence: Synthetic oligonucleotide
  modified_base 1: mod_base = um
  modified_base 1..3: mod_base = OTHER; note = Phosphorothioate internucleotide linkage
  modified_base 2: mod_base = OTHER; note = 2-prime-fluorouridine
  modified_base 3: mod_base = cm
  modified_base 4: mod_base = OTHER; note = 2-prime-fluoroadenosine
  modified_base 5..6: mod_base = OTHER; note = 2-prime-fluoroguanosine
  modified_base 7: mod_base = OTHER; note = 2-prime-O-methyladenosine
  modified_base 8: mod_base = OTHER; note = 2-prime-fluorocytidine
  modified_base 9: mod_base = gm
  modified_base 9: mod_base = OTHER; note = 2-prime-fluoroguanosine
  modified_base 10: mod_base = OTHER; note = 2-prime-fluorouridine
  modified_base 11: mod_base = cm
  modified_base 13: mod_base = um
  modified_base 13..20: mod_base = OTHER; note = Phosphorothioate internucleotide linkage
  modified_base 15: mod_base = cm
  modified_base 16: mod_base = OTHER; note = 2-prime-fluoroadenosine
  modified_base 17: mod_base = gm
  modified_base 17: mod_base = OTHER; note = 2-prime-fluoroguanosine
  modified_base 18..19: mod_base = um
  modified_base 20: mod_base = OTHER; note = 2-prime-fluorouridine
  source 1..20: mol_type = other RNA
ttcaggacgtcgtgcagttt

SEQ ID NO: 444 - RNA, 20 nt, synthetic construct
  misc_feature 1..20: note = Description of Artificial Sequence: Synthetic oligonucleotide
  modified_base 1: mod_base = um
  modified_base 1..3: mod_base = OTHER; note = Phosphorothioate internucleotide linkage
  modified_base 2: mod_base = OTHER; note = 2-prime-fluorouridine
  modified_base 3: mod_base = um
  modified_base 4: mod_base = OTHER; note = 2-prime-fluoroguanosine
  modified_base 5: mod_base = OTHER; note = 2-prime-fluorocytidine
  modified_base 6: mod_base = OTHER; note = 2-prime-fluoroguanosine
  modified_base 7: mod_base = gm
  modified_base 8: mod_base = OTHER; note = 2-prime-fluorocytidine
  modified_base 9: mod_base = cm
  modified_base 10: mod_base = OTHER; note = 2-prime-fluoroadenosine
  modified_base 11: mod_base = OTHER; note = 2-prime-O-methyladenosine
  modified_base 12: mod_base = OTHER; note = 2-prime-fluoroadenosine
  modified_base 13: mod_base = OTHER; note = 2-prime-O-methyladenosine
  modified_base 13..20: mod_base = OTHER; note = Phosphorothioate internucleotide linkage
  modified_base 14: mod_base = OTHER; note = 2-prime-fluoroguanosine
  modified_base 15: mod_base = cm
  modified_base 16: mod_base = OTHER; note = 2-prime-fluoroadenosine
  modified_base 17..19: mod_base = um
  modified_base 20: mod_base = OTHER; note = 2-prime-fluorocytidine
  source 1..20: mol_type = other RNA
tttgcggccaaaagcatttc

SEQ ID NO: 445 - RNA, 20 nt, synthetic construct
  misc_feature 1..20: note = Description of Artificial Sequence: Synthetic oligonucleotide
  modified_base 1: mod_base = um
  modified_base 1..3: mod_base = OTHER; note = Phosphorothioate internucleotide linkage
  modified_base 2: mod_base = OTHER; note = 2-prime-fluoroadenosine
  modified_base 3: mod_base = OTHER; note = 2-prime-O-methyladenosine
  modified_base 4: mod_base = OTHER; note = 2-prime-fluoroadenosine
  modified_base 5: mod_base = OTHER; note = 2-prime-fluorocytidine
  modified_base 6: mod_base = OTHER; note = 2-prime-fluorouridine
  modified_base 7: mod_base = gm
  modified_base 8: mod_base = OTHER; note = 2-prime-fluorocytidine
  modified_base 9: mod_base = um
  modified_base 10: mod_base = OTHER; note = 2-prime-fluorouridine
  modified_base 11: mod_base = cm
  modified_base 12: mod_base = OTHER; note = 2-prime-fluoroadenosine
  modified_base 13: mod_base = gm
  modified_base 13..20: mod_base = OTHER; note = Phosphorothioate internucleotide linkage
  modified_base 14: mod_base = OTHER; note = 2-prime-fluorocytidine
  modified_base 15: mod_base = OTHER; note = 2-prime-O-methyladenosine
  modified_base 16: mod_base = OTHER; note = 2-prime-fluorocytidine
  modified_base 17..19: mod_base = OTHER; note = 2-prime-O-methyladenosine
  modified_base 20: mod_base = OTHER; note = 2-prime-fluorouridine
  source 1..20: mol_type = other RNA
taaactgcttcagcacaaat

SEQ ID NO: 446 - RNA, 20 nt, synthetic construct
  misc_feature 1..20: note = Description of Artificial Sequence: Synthetic oligonucleotide
  modified_base 1: mod_base = um
  modified_base 1..3: mod_base = OTHER; note = Phosphorothioate internucleotide linkage
  modified_base 2: mod_base = OTHER; note = 2-prime-fluorocytidine
  modified_base 3: mod_base = um
  modified_base 4: mod_base = OTHER; note = 2-prime-fluoroguanosine
  modified_base 5: mod_base = OTHER; note = 2-prime-fluorocytidine
  modified_base 6: mod_base = OTHER; note = 2-prime-fluoroguanosine
  modified_base 7: mod_base = um
  modified_base 8: mod_base = OTHER; note = 2-prime-fluorocytidine
  modified_base 9: mod_base = OTHER; note = 2-prime-O-methyladenosine
  modified_base 10: mod_base = OTHER; note = 2-prime-fluorouridine
  modified_base 11: mod_base = cm
  modified_base 12: mod_base = OTHER; note = 2-prime-fluoroadenosine
  modified_base 13: mod_base = cm
  modified_base 13..20: mod_base = OTHER; note = Phosphorothioate internucleotide linkage
  modified_base 14: mod_base = OTHER; note = 2-prime-fluorouridine
  modified_base 15: mod_base = gm
  modified_base 16: mod_base = OTHER; note = 2-prime-fluorocytidine
  modified_base 17: mod_base = OTHER; note = 2-prime-O-methyladenosine
  modified_base 18: mod_base = cm
  modified_base 19: mod_base = OTHER; note = 2-prime-O-methyladenosine
  modified_base 20: mod_base = OTHER; note = 2-prime-fluoroguanosine
  source 1..20: mol_type = other RNA
tctgcgtcatcactgcacag

SEQ ID NO: 447 - RNA, 20 nt, synthetic construct
  misc_feature 1..20: note = Description of Artificial Sequence: Synthetic oligonucleotide
  modified_base 1: mod_base = um
  modified_base 1..3: mod_base = OTHER; note = Phosphorothioate internucleotide linkage
  modified_base 2: mod_base = OTHER; note = 2-prime-fluorouridine
  modified_base 3: mod_base = gm
  modified_base 3: mod_base = OTHER; note = 2-prime-fluoroguanosine
  modified_base 4: mod_base = OTHER; note = 2-prime-fluoroadenosine
  modified_base 5: mod_base = OTHER; note = 2-prime-fluorouridine
  modified_base 7: mod_base = cm
  modified_base 9: mod_base = gm
  modified_base 9: mod_base = OTHER; note = 2-prime-fluoroguanosine
  modified_base 10: mod_base = OTHER; note = 2-prime-fluorouridine
  modified_base 11: mod_base = OTHER; note = 2-prime-O-methyladenosine
  modified_base 13: mod_base = OTHER; note = 2-prime-O-methyladenosine
  modified_base 13..20: mod_base = OTHER; note = Phosphorothioate internucleotide linkage
  modified_base 14: mod_base = OTHER; note = 2-prime-fluorouridine
  modified_base 15: mod_base = gm
  modified_base 15: mod_base = OTHER; note = 2-prime-fluoroguanosine
  modified_base 16: mod_base = OTHER; note = 2-prime-fluoroadenosine
  modified_base 17: mod_base = OTHER; note = 2-prime-O-methyladenosine
  modified_base 18: mod_base = cm
  modified_base 19: mod_base = um
  modified_base 20: mod_base = OTHER; note = 2-prime-fluorocytidine
  source 1..20: mol_type = other RNA
ttgatgcggtagatgaactc

SEQ ID NO: 448 - RNA, 20 nt, synthetic construct
  misc_feature 1..20: note = Description of Artificial Sequence: Synthetic oligonucleotide
  modified_base 1: mod_base = um
  modified_base 1..3: mod_base = OTHER; note = Phosphorothioate internucleotide linkage
  modified_base 2: mod_base = OTHER; note = 2-prime-fluorouridine
  modified_base 3: mod_base = cm
  modified_base 4: mod_base = OTHER; note = 2-prime-fluorocytidine
  modified_base 5: mod_base = OTHER; note = 2-prime-fluorouridine
  modified_base 6: mod_base = OTHER; note = 2-prime-fluoroguanosine
  modified_base 7: mod_base = um
  modified_base 8: mod_base = OTHER; note = 2-prime-fluoroguanosine
  modified_base 9: mod_base = um
  modified_base 10: mod_base = OTHER; note = 2-prime-fluoroadenosine
  modified_base 11: mod_base = cm
  modified_base 12: mod_base = OTHER; note = 2-prime-fluoroadenosine
  modified_base 13: mod_base = um
  modified_base 13..20: mod_base = OTHER; note = Phosphorothioate internucleotide linkage
  modified_base 14: mod_base = OTHER; note = 2-prime-fluoroguanosine
  modified_base 15: mod_base = cm
  modified_base 16: mod_base = OTHER; note = 2-prime-fluoroadenosine
  modified_base 17..18: mod_base = gm
  modified_base 19: mod_base = um
  modified_base 20: mod_base = OTHER; note = 2-prime-fluoroguanosine
  source 1..20: mol_type = other RNA
ttcctgtgtacatgcaggtg

SEQ ID NO: 449 - RNA, 20 nt, synthetic construct
  misc_feature 1..20: note = Description of Artificial Sequence: Synthetic oligonucleotide
  modified_base 1: mod_base = um
  modified_base 1..3: mod_base = OTHER; note = Phosphorothioate internucleotide linkage
  modified_base 2: mod_base = OTHER; note = 2-prime-fluorouridine
  modified_base 3: mod_base = um
  modified_base 4: mod_base = OTHER; note = 2-prime-fluorouridine
  modified_base 5: mod_base = OTHER; note = 2-prime-fluoroadenosine
  modified_base 6: mod_base = OTHER; note = 2-prime-fluoroguanosine
  modified_base 7: mod_base = gm
  modified_base 8: mod_base = OTHER; note = 2-prime-fluoroguanosine
  modified_base 9: mod_base = OTHER; note = 2-prime-O-methyladenosine
  modified_base 10: mod_base = OTHER; note = 2-prime-fluorouridine
  modified_base 11: mod_base = cm
  modified_base 12: mod_base = OTHER; note = 2-prime-O-methyladenosine
  modified_base 12: mod_base = OTHER; note = 2-prime-fluoroguanosine
  modified_base 13: mod_base = cm
  modified_base 13..20: mod_base = OTHER; note = Phosphorothioate internucleotide linkage
  modified_base 14: mod_base = OTHER; note = 2-prime-fluorouridine
  modified_base 15: mod_base = gm
  modified_base 16: mod_base = OTHER; note = 2-prime-fluorocytidine
  modified_base 18: mod_base = gm
  modified_base 19: mod_base = cm
  modified_base 20: mod_base = OTHER; note = 2-prime-fluorocytidine
  source 1..20: mol_type = other RNA
ttttagggatcgctgcagcc

SEQ ID NO: 450 - RNA, 20 nt, synthetic construct
  misc_feature 1..20: note = Description of Artificial Sequence: Synthetic oligonucleotide
  modified_base 1: mod_base = um
  modified_base 1..3: mod_base = OTHER; note = Phosphorothioate internucleotide linkage
  modified_base 2: mod_base = OTHER; note = 2-prime-fluorouridine
  modified_base 3: mod_base = OTHER; note = 2-prime-O-methyladenosine
  modified_base 4: mod_base = OTHER; note = 2-prime-fluoroguanosine
  modified_base 5: mod_base = OTHER; note = 2-prime-fluorocytidine
  modified_base 6: mod_base = OTHER; note = 2-prime-fluoroguanosine
  modified_base 7: mod_base = OTHER; note = 2-prime-O-methyladenosine
  modified_base 8: mod_base = OTHER; note = 2-prime-fluorouridine
  modified_base 9: mod_base = gm
  modified_base 10: mod_base = OTHER; note = 2-prime-fluorocytidine
  modified_base 11: mod_base = cm
  modified_base 12: mod_base = OTHER; note = 2-prime-fluorocytidine
  modified_base 13: mod_base = OTHER; note = 2-prime-O-methyladenosine
  modified_base 13..20: mod_base = OTHER; note = Phosphorothioate internucleotide linkage
  modified_base 14: mod_base = OTHER; note = 2-prime-fluoroguanosine
  modified_base 15: mod_base = OTHER; note = 2-prime-O-methyladenosine
  modified_base 16: mod_base = OTHER; note = 2-prime-fluoroadenosine
  modified_base 17: mod_base = gm
  modified_base 18..19: mod_base = um
  modified_base 20: mod_base = OTHER; note = 2-prime-fluorouridine
  source 1..20: mol_type = other RNA
ttagcgatgcccagaagttt

SEQ ID NO: 451 - RNA, 20 nt, synthetic construct
  misc_feature 1..20: note = Description of Artificial Sequence: Synthetic oligonucleotide
  modified_base 1: mod_base = um
  modified_base 1..3: mod_base = OTHER; note = Phosphorothioate internucleotide linkage
  modified_base 2: mod_base = OTHER; note = 2-prime-fluoroguanosine
  modified_base 3: mod_base = um
  modified_base 4..5: mod_base = OTHER; note = 2-prime-fluorocytidine
  modified_base 6: mod_base = OTHER; note = 2-prime-fluorouridine
  modified_base 7: mod_base = cm
  modified_base 9: mod_base = gm
  modified_base 10: mod_base = OTHER; note = 2-prime-fluorouridine
  modified_base 11: mod_base = cm
  modified_base 13: mod_base = cm
  modified_base 13..20: mod_base = OTHER; note = Phosphorothioate internucleotide linkage
  modified_base 14: mod_base = OTHER; note = 2-prime-fluoroadenosine
  modified_base 14: mod_base = OTHER; note = 2-prime-fluoroguanosine
  modified_base 15: mod_base = cm
  modified_base 16: mod_base = OTHER; note = 2-prime-fluorouridine
  modified_base 17: mod_base = um
  modified_base 18: mod_base = gm
  modified_base 19: mod_base = um
  modified_base 20: mod_base = OTHER; note = 2-prime-fluoroadenosine
  modified_base 20: mod_base = OTHER; note = 2-prime-fluoroguanosine
  source 1..20: mol_type = other RNA
tgtcctcggtcgcacttgta

SEQ ID NO: 452 - RNA, 20 nt, synthetic construct
  misc_feature 1..20: note = Description of Artificial Sequence: Synthetic oligonucleotide
  modified_base 1: mod_base = um
  modified_base 1..3: mod_base = OTHER; note = Phosphorothioate internucleotide linkage
  modified_base 2: mod_base = OTHER; note = 2-prime-fluoroguanosine
  modified_base 3: mod_base = um
  modified_base 4: mod_base = OTHER; note = 2-prime-fluoroadenosine
  modified_base 5: mod_base = OTHER; note = 2-prime-fluorocytidine
  modified_base 6: mod_base = OTHER; note = 2-prime-fluorouridine
  modified_base 7: mod_base = gm
  modified_base 8: mod_base = OTHER; note = 2-prime-fluorocytidine
  modified_base 9: mod_base = um
  modified_base 10: mod_base = OTHER; note = 2-prime-fluorouridine
  modified_base 11: mod_base = cm
  modified_base 12: mod_base = OTHER; note = 2-prime-fluoroadenosine
  modified_base 13: mod_base = gm
  modified_base 13..20: mod_base = OTHER; note = Phosphorothioate internucleotide linkage
  modified_base 14: mod_base = OTHER; note = 2-prime-fluorouridine
  modified_base 15: mod_base = gm
  modified_base 16: mod_base = OTHER; note = 2-prime-fluorocytidine
  modified_base 17..19: mod_base = um
  modified_base 20: mod_base = OTHER; note = 2-prime-fluorouridine
  source 1..20: mol_type = other RNA
tgtactgcttcagtgctttt

SEQ ID NO: 453 - RNA, 20 nt, synthetic construct
  misc_feature 1..20: note = Description of Artificial Sequence: Synthetic oligonucleotide
  modified_base 1: mod_base = um
  modified_base 1..3: mod_base = OTHER; note = Phosphorothioate internucleotide linkage
  modified_base 2: mod_base = OTHER; note = 2-prime-fluoroguanosine
  modified_base 3: mod_base = cm
  modified_base 4..5: mod_base = OTHER; note = 2-prime-fluoroguanosine
  modified_base 6: mod_base = OTHER; note = 2-prime-fluorouridine
  modified_base 7: mod_base = OTHER; note = 2-prime-O-methyladenosine
  modified_base 8: mod_base = OTHER; note = 2-prime-fluoroguanosine
  modified_base 9: mod_base = OTHER; note = 2-prime-O-methyladenosine
  modified_base 10: mod_base = OTHER; note = 2-prime-fluorouridine
  modified_base 11: mod_base = gm
  modified_base 12: mod_base = OTHER; note = 2-prime-fluoroadenosine
  modified_base 13: mod_base = OTHER; note = 2-prime-O-methyladenosine
  modified_base 13..20: mod_base = OTHER; note = Phosphorothioate internucleotide linkage
  modified_base 14: mod_base = OTHER; note = 2-prime-fluorocytidine
  modified_base 15: mod_base = um
  modified_base 16: mod_base = OTHER; note = 2-prime-fluorocytidine
  modified_base 17..19: mod_base = um
  modified_base 20: mod_base = OTHER; note = 2-prime-fluoroadenosine
  source 1..20: mol_type = other RNA
tgcggtagatgaactcttta

SEQ ID NO: 454 - RNA, 20 nt, synthetic construct
  misc_feature 1..20: note = Description of Artificial Sequence: Synthetic oligonucleotide
  modified_base 1: mod_base = um
  modified_base 1..3: mod_base = OTHER; note = Phosphorothioate internucleotide linkage
  modified_base 2: mod_base = OTHER; note = 2-prime-fluorocytidine
  modified_base 3: mod_base = cm
  modified_base 4: mod_base = OTHER; note = 2-prime-fluoroadenosine
  modified_base 5: mod_base = OTHER; note = 2-prime-fluoroguanosine
  modified_base 6: mod_base = OTHER; note = 2-prime-fluorouridine
  modified_base 7: mod_base = um
  modified_base 8: mod_base = OTHER; note = 2-prime-fluoroguanosine
  modified_base 9: mod_base = gm
  modified_base 10: mod_base = OTHER; note = 2-prime-fluoroadenosine
  modified_base 11: mod_base = gm
  modified_base 12: mod_base = OTHER; note = 2-prime-fluorocytidine
  modified_base 13: mod_base = OTHER; note = 2-prime-O-methyladenosine
  modified_base 13..20: mod_base = OTHER; note = Phosphorothioate internucleotide linkage
  modified_base 14: mod_base = OTHER; note = 2-prime-fluoroguanosine
  modified_base 15: mod_base = OTHER; note = 2-prime-O-methyladenosine
  modified_base 16: mod_base = OTHER; note = 2-prime-fluoroadenosine
  modified_base 17: mod_base = OTHER; note = 2-prime-O-methyladenosine
  modified_base 18..19: mod_base = cm
  modified_base 20: mod_base = OTHER; note = 2-prime-fluorouridine
  source 1..20: mol_type = other RNA
tccagttggagcagaaacct

SEQ ID NO: 455 - RNA, 20 nt, synthetic construct
  misc_feature 1..20: note = Description of Artificial Sequence: Synthetic oligonucleotide
  modified_base 1: mod_base = um
  modified_base 1..3: mod_base = OTHER; note = Phosphorothioate internucleotide linkage
  modified_base 2: mod_base = OTHER; note = 2-prime-fluorocytidine
  modified_base 3: mod_base = um
  modified_base 4..5: mod_base = OTHER; note = 2-prime-fluorocytidine
  modified_base 6: mod_base = OTHER; note = 2-prime-fluoroadenosine
  modified_base 7: mod_base = OTHER; note = 2-prime-O-methyladenosine
  modified_base 8: mod_base = OTHER; note = 2-prime-fluoroguanosine
  modified_base 9: mod_base = cm
  modified_base 10: mod_base = OTHER; note = 2-prime-fluoroadenosine
  modified_base 11: mod_base = gm
  modified_base 12: mod_base = OTHER; note = 2-prime-fluoroadenosine
  modified_base 13: mod_base = um
  modified_base 13..20: mod_base = OTHER; note = Phosphorothioate internucleotide linkage
  modified_base 14: mod_base = OTHER; note = 2-prime-fluoroguanosine
  modified_base 15: mod_base = gm
  modified_base 16: mod_base = OTHER; note = 2-prime-fluoroadenosine
  modified_base 17: mod_base = um
  modified_base 18: mod_base = gm
  modified_base 19: mod_base = OTHER; note = 2-prime-O-methyladenosine
  modified_base 20: mod_base = OTHER; note = 2-prime-fluorocytidine
  source 1..20: mol_type = other RNA
tctccaagcagatggatgac

SEQ ID NO: 456 - RNA, 20 nt, synthetic construct
  misc_feature 1..20: note = Description of Artificial Sequence: Synthetic oligonucleotide
  modified_base 1: mod_base = um
  modified_base 1..3: mod_base = OTHER; note = Phosphorothioate internucleotide linkage
  modified_base 2: mod_base = OTHER; note = 2-prime-fluorouridine
  modified_base 3: mod_base = um
  modified_base 4..6: mod_base = OTHER; note = 2-prime-fluoroguanosine
  modified_base 7: mod_base = OTHER; note = 2-prime-O-methyladenosine
  modified_base 8: mod_base = OTHER; note = 2-prime-fluorocytidine
  modified_base 9: mod_base = gm
  modified_base 10: mod_base = OTHER; note = 2-prime-fluoroadenosine
  modified_base 11: mod_base = gm
  modified_base 12: mod_base = OTHER; note = 2-prime-fluorocytidine
  modified_base 13: mod_base = cm
  modified_base 13..20: mod_base = OTHER; note = Phosphorothioate internucleotide linkage
  modified_base 14: mod_base = OTHER; note = 2-prime-fluorouridine
  modified_base 15: mod_base = cm
  modified_base 16: mod_base = OTHER; note = 2-prime-fluoroadenosine
  modified_base 17: mod_base = um
  modified_base 18: mod_base = cm
  modified_base 19: mod_base = OTHER; note = 2-prime-O-methyladenosine
  modified_base 20: mod_base = OTHER; note = 2-prime-fluoroadenosine
  source 1..20: mol_type = other RNA
tttgggacgagcctcatcaa

SEQ ID NO: 457 - RNA, 20 nt, synthetic construct
  misc_feature 1..20: note = Description of Artificial Sequence: Synthetic oligonucleotide
  modified_base 1: mod_base = um
  modified_base 1..3: mod_base = OTHER; note = Phosphorothioate internucleotide linkage
  modified_base 2: mod_base = OTHER; note = 2-prime-fluoroguanosine
  modified_base 3: mod_base = um
  modified_base 4: mod_base = OTHER; note = 2-prime-fluorouridine
  modified_base 5: mod_base = OTHER; note = 2-prime-fluorocytidine
  modified_base 6: mod_base = OTHER; note = 2-prime-fluorouridine
  modified_base 7: mod_base = OTHER; note = 2-prime-O-methyladenosine
  modified_base 8: mod_base = OTHER; note = 2-prime-fluoroguanosine
  modified_base 9: mod_base = cm
  modified_base 10: mod_base = OTHER; note = 2-prime-fluorouridine
  modified_base 11: mod_base = gm
  modified_base 12: mod_base = OTHER; note = 2-prime-fluorocytidine
  modified_base 13: mod_base = OTHER; note = 2-prime-O-methyladenosine
  modified_base 13..20: mod_base = OTHER; note = Phosphorothioate internucleotide linkage
  modified_base 14: mod_base = OTHER; note = 2-prime-fluoroadenosine
  modified_base 15: mod_base = cm
  modified_base 16: mod_base = OTHER; note = 2-prime-fluorocytidine
  modified_base 17: mod_base = um
  modified_base 18: mod_base = cm
  modified_base 19: mod_base = gm
  modified_base 20: mod_base = OTHER; note = 2-prime-fluoroguanosine
  source 1..20: mol_type = other RNA
tgttctagctgcaacctcgg

SEQ ID NO: 458 - RNA, 20 nt, synthetic construct
  misc_feature 1..20: note = Description of Artificial Sequence: Synthetic oligonucleotide
  modified_base 1: mod_base = um
  modified_base 1..3: mod_base = OTHER; note = Phosphorothioate internucleotide linkage
  modified_base 2: mod_base = OTHER; note = 2-prime-fluorouridine
  modified_base 3: mod_base = um
  modified_base 4: mod_base = OTHER; note = 2-prime-fluorocytidine
  modified_base 5: mod_base = OTHER; note = 2-prime-fluoroadenosine
  modified_base 6: mod_base = OTHER; note = 2-prime-fluoroguanosine
  modified_base 7: mod_base = cm
  modified_base 8: mod_base = OTHER; note = 2-prime-fluoroadenosine
  modified_base 9: mod_base = OTHER; note = 2-prime-O-methyladenosine
  modified_base 10: mod_base = OTHER; note = 2-prime-fluorocytidine
  modified_base 11: mod_base = um
  modified_base 12: mod_base = OTHER; note = 2-prime-fluoroguanosine
  modified_base 13: mod_base = cm
  modified_base 13..20: mod_base = OTHER; note = Phosphorothioate internucleotide linkage
  modified_base 14: mod_base = OTHER; note = 2-prime-fluorouridine
  modified_base 15: mod_base = gm
  modified_base 16: mod_base = OTHER; note = 2-prime-fluoroadenosine
  modified_base 17: mod_base = OTHER; note = 2-prime-O-methyladenosine
  modified_base 18: mod_base = cm
  modified_base 19: mod_base = OTHER; note = 2-prime-O-methyladenosine
  modified_base 20: mod_base = OTHER; note = 2-prime-fluorocytidine
  source 1..20: mol_type = other RNA
tttcagcaactgctgaacac

SEQ ID NO: 459 - RNA, 20 nt, synthetic construct
  misc_feature 1..20: note = Description of Artificial Sequence: Synthetic oligonucleotide
  modified_base 1: mod_base = um
  modified_base 1..3: mod_base = OTHER; note = Phosphorothioate internucleotide linkage
  modified_base 2: mod_base = OTHER; note = 2-prime-fluorocytidine
  modified_base 3: mod_base = um
  modified_base 4..5: mod_base = OTHER; note = 2-prime-fluoroguanosine
  modified_base 6: mod_base = OTHER; note = 2-prime-fluorouridine
  modified_base 7: mod_base = gm
  modified_base 8: mod_base = OTHER; note = 2-prime-fluorouridine
  modified_base 9: mod_base = cm
  modified_base 10: mod_base = OTHER; note = 2-prime-fluorouridine
  modified_base 11: mod_base = cm
  modified_base 12: mod_base = OTHER; note = 2-prime-fluorouridine
  modified_base 13: mod_base = gm
  modified_base 13..20: mod_base = OTHER; note = Phosphorothioate internucleotide linkage
  modified_base 14: mod_base = OTHER; note = 2-prime-fluorouridine
  modified_base 15: mod_base = gm
  modified_base 16: mod_base = OTHER; note = 2-prime-fluorocytidine
  modified_base 17: mod_base = um
  modified_base 18..19: mod_base = OTHER; note = 2-prime-O-methyladenosine
  modified_base 20: mod_base = OTHER; note = 2-prime-fluorocytidine
  source 1..20: mol_type = other RNA
tctggtgtctctgtgctaac

SEQ ID NO: 460 - RNA, 20 nt, synthetic construct
  misc_feature 1..20: note = Description of Artificial Sequence: Synthetic oligonucleotide
  modified_base 1: mod_base = um
  modified_base 1..3: mod_base = OTHER; note = Phosphorothioate internucleotide linkage
  modified_base 2: mod_base = OTHER; note = 2-prime-fluoroguanosine
  modified_base 3: mod_base = um
  modified_base 4: mod_base = OTHER; note = 2-prime-fluoroadenosine
  modified_base 5: mod_base = OTHER; note = 2-prime-fluoroguanosine
  modified_base 6: mod_base = OTHER; note = 2-prime-fluoroadenosine
  modified_base 7: mod_base = gm
  modified_base 7: mod_base = gm
  modified_base 8: mod_base = OTHER; note = 2-prime-fluorouridine
  modified_base 9: mod_base = um
  modified_base 10: mod_base = OTHER; note = 2-prime-fluorouridine
  modified_base 11: mod_base = gm
  modified_base 12: mod_base = OTHER; note = 2-prime-fluorocytidine
  modified_base 13: mod_base = um
  modified_base 13..20: mod_base = OTHER; note = Phosphorothioate internucleotide linkage
  modified_base 14: mod_base = OTHER; note = 2-prime-fluoroguanosine
  modified_base 15: mod_base = OTHER; note = 2-prime-O-methyladenosine
  modified_base 16: mod_base = OTHER; note = 2-prime-fluoroadenosine
  modified_base 17: mod_base = gm
  modified_base 18..19: mod_base = OTHER; note = 2-prime-O-methyladenosine
  modified_base 20: mod_base = OTHER; note = 2-prime-fluoroadenosine
  source 1..20: mol_type = other RNA
tgtagagtttgctgaagaaa

SEQ ID NO: 461 - RNA, 20 nt, synthetic construct
  misc_feature 1..20: note = Description of Artificial Sequence: Synthetic oligonucleotide
  modified_base 1: mod_base = um
  modified_base 1..3: mod_base = OTHER; note = Phosphorothioate internucleotide linkage
  modified_base 2: mod_base = OTHER; note = 2-prime-fluorouridine
  modified_base 3: mod_base = um
  modified_base 4: mod_base = OTHER; note = 2-prime-fluorocytidine
  modified_base 5..6: mod_base = OTHER; note = 2-prime-fluorouridine
  modified_base 7: mod_base = gm
  modified_base 8: mod_base = OTHER; note = 2-prime-fluoroguanosine
  modified_base 9: mod_base = gm
  modified_base 10: mod_base = OTHER; note = 2-prime-fluoroadenosine
  modified_base 11: mod_base = cm
  modified_base 12: mod_base = OTHER; note = 2-prime-fluorouridine
  modified_base 13: mod_base = cm
  modified_base 13..20: mod_base = OTHER; note = Phosphorothioate internucleotide linkage
  modified_base 14: mod_base = OTHER; note = 2-prime-fluoroadenosine
  modified_base 15: mod_base = cm
  modified_base 16: mod_base = OTHER; note = 2-prime-fluoroguanosine
  modified_base 17..18: mod_base = gm
  modified_base 19: mod_base = cm
  modified_base 20: mod_base = OTHER; note = 2-prime-fluoroadenosine
  source 1..20: mol_type = other RNA
tttcttgggactcacgggca

SEQ ID NO: 462 - RNA, 20 nt, synthetic construct
  misc_feature 1..20: note = Description of Artificial Sequence: Synthetic oligonucleotide
  modified_base 1: mod_base = um
  modified_base 1..3: mod_base = OTHER; note = Phosphorothioate internucleotide linkage
  modified_base 2: mod_base = OTHER; note = 2-prime-fluorouridine
  modified_base 3: mod_base = um
  modified_base 4: mod_base = OTHER; note = 2-prime-fluorocytidine
  modified_base 5: mod_base = OTHER; note = 2-prime-fluoroadenosine
  modified_base 6: mod_base = OTHER; note = 2-prime-fluorocytidine
  modified_base 7: mod_base = OTHER; note = 2-prime-O-methyladenosine
  modified_base 8: mod_base = OTHER; note = 2-prime-fluoroguanosine
  modified_base 9: mod_base = OTHER; note = 2-prime-O-methyladenosine
  modified_base 10: mod_base = OTHER; note = 2-prime-fluorouridine
  modified_base 11: mod_base = um
  modified_base 12: mod_base = OTHER; note = 2-prime-fluoroguanosine
  modified_base 13: mod_base = um
  modified_base 13..20: mod_base = OTHER; note = Phosphorothioate internucleotide linkage
  modified_base 14: mod_base = OTHER; note = 2-prime-fluorocytidine
  modified_base 15: mod_base = OTHER; note = 2-prime-O-methyladenosine
  modified_base 16: mod_base = OTHER; note = 2-prime-fluoroguanosine
  modified_base 17: mod_base = OTHER; note = 2-prime-O-methyladenosine
  modified_base 18: mod_base = cm
  modified_base 19: mod_base = OTHER; note = 2-prime-O-methyladenosine
  modified_base 20: mod_base = OTHER; note = 2-prime-fluoroguanosine
  source 1..20: mol_type = other RNA
tttcacagattgtcagacag

SEQ ID NO: 463 - RNA, 20 nt, synthetic construct
  misc_feature 1..20: note = Description of Artificial Sequence: Synthetic oligonucleotide
  modified_base 1: mod_base = um
  modified_base 1..3: mod_base = OTHER; note = Phosphorothioate internucleotide linkage
  modified_base 2: mod_base = OTHER; note = 2-prime-fluorouridine
  modified_base 3: mod_base = cm
  modified_base 4: mod_base = OTHER; note = 2-prime-fluoroadenosine
  modified_base 5: mod_base = OTHER; note = 2-prime-fluoroguanosine
  modified_base 6: mod_base = OTHER; note = 2-prime-fluorouridine
  modified_base 7: mod_base = gm
  modified_base 8: mod_base = OTHER; note = 2-prime-fluoroguanosine
  modified_base 9: mod_base = OTHER; note = 2-prime-O-methyladenosine
  modified_base 10: mod_base = OTHER; note = 2-prime-fluorocytidine
  modified_base 11: mod_base = um
  modified_base 12: mod_base = OTHER; note = 2-prime-fluoroguanosine
  modified_base 13: mod_base = gm
  modified_base 13..20: mod_base = OTHER; note = Phosphorothioate internucleotide linkage
  modified_base 14: mod_base = OTHER; note = 2-prime-fluorocytidine
  modified_base 15: mod_base = cm
  modified_base 16: mod_base = OTHER; note = 2-prime-fluoroadenosine
  modified_base 17: mod_base = OTHER; note = 2-prime-O-methyladenosine
  modified_base 18: mod_base = um
  modified_base 19: mod_base = gm
  modified_base 20: mod_base = OTHER; note = 2-prime-fluorouridine
  source 1..20: mol_type = other RNA
ttcagtggactggccaatgt

SEQ ID NO: 464 - RNA, 20 nt, synthetic construct
  misc_feature 1..20: note = Description of Artificial Sequence: Synthetic oligonucleotide
  modified_base 1: mod_base = um
  modified_base 1..3: mod_base = OTHER; note = Phosphorothioate internucleotide linkage
  modified_base 2: mod_base = OTHER; note = 2-prime-fluoroguanosine
  modified_base 3: mod_base = gm
  modified_base 4: mod_base = OTHER; note = 2-prime-fluorouridine
  modified_base 5: mod_base = OTHER; note = 2-prime-fluoroadenosine
  modified_base 6: mod_base = OTHER; note = 2-prime-fluorouridine
  modified_base 7: mod_base = cm
  modified_base 8: mod_base = OTHER; note = 2-prime-fluorocytidine
  modified_base 9: mod_base = cm
  modified_base 10: mod_base = OTHER; note = 2-prime-fluoroadenosine
  modified_base 11: mod_base = gm
  modified_base 12: mod_base = OTHER; note = 2-prime-fluoroguanosine
  modified_base 13: mod_base = OTHER; note = 2-prime-O-methyladenosine
  modified_base 13..20: mod_base = OTHER; note = Phosphorothioate internucleotide linkage
  modified_base 14: mod_base = OTHER; note = 2-prime-fluorouridine
  modified_base 15: mod_base = cm
  modified_base 16: mod_base = OTHER; note = 2-prime-fluorouridine
  modified_base 17: mod_base = cm
  modified_base 18..19: mod_base = um
  modified_base 20: mod_base = OTHER; note = 2-prime-fluorocytidine
  source 1..20: mol_type = other RNA
tggtatcccaggatctcttc

SEQ ID NO: 465 - RNA, 15 nt, synthetic construct
  misc_feature 1..15: note = Description of Artificial Sequence: Synthetic oligonucleotide
  modified_base 1: mod_base = cm
  modified_base 1..3: mod_base = OTHER; note = Phosphorothioate internucleotide linkage
  modified_base 2: mod_base = OTHER; note = 2-prime-O-methyladenosine
  modified_base 3: mod_base = OTHER; note = 2-prime-fluorocytidine
  modified_base 4: mod_base = cm
  modified_base 5: mod_base = OTHER; note = 2-prime-fluoroguanosine
  modified_base 6: mod_base = OTHER; note = 2-prime-O-methyladenosine
  modified_base 7: mod_base = OTHER; note = 2-prime-fluorocytidine
  modified_base 8: mod_base = cm
  modified_base 9: mod_base = OTHER; note = 2-prime-fluoroadenosine
  modified_base 10..11: mod_base = OTHER; note = 2-prime-O-methyladenosine
  modified_base 12: mod_base = gm
  modified_base 13..15: mod_base = OTHER; note = Phosphorothioate internucleotide linkage
  modified_base 13: mod_base = OTHER; note = 2-prime-fluoroadenosine
  modified_base 14..15: mod_base = OTHER; note = 2-prime-O-methyladenosine
  source 1..15: mol_type = other RNA
caccgaccaaagaaa

SEQ ID NO: 466 - RNA, 15 nt, synthetic construct
  misc_feature 1..15: note = Description of Artificial Sequence: Synthetic oligonucleotide
  modified_base 1: mod_base = cm
  modified_base 1..3: mod_base = OTHER; note = Phosphorothioate internucleotide linkage
  modified_base 2: mod_base = OTHER; note = 2-prime-O-methyladenosine
  modified_base 3: mod_base = OTHER; note = 2-prime-fluoroguanosine
  modified_base 4: mod_base = cm
  modified_base 5: mod_base = OTHER; note = 2-prime-fluorocytidine
  modified_base 6: mod_base = OTHER; note = 2-prime-O-methyladenosine
  modified_base 7: mod_base = OTHER; note = 2-prime-fluorocytidine
  modified_base 8: mod_base = cm
  modified_base 9: mod_base = OTHER; note = 2-prime-fluoroadenosine
  modified_base 10: mod_base = OTHER; note = 2-prime-O-methyladenosine
  modified_base 11: mod_base = gm
  modified_base 12: mod_base = OTHER; note = 2-prime-O-methyladenosine
  modified_base 13..15: mod_base = OTHER; note = Phosphorothioate internucleotide linkage
  modified_base 13: mod_base = OTHER; note = 2-prime-fluoroadenosine
  modified_base 14..15: mod_base = OTHER; note = 2-prime-O-methyladenosine
  source 1..15: mol_type = other RNA
cagccaccaagaaaa

SEQ ID NO: 467 - RNA, 15 nt, synthetic construct
  misc_feature 1..15: note = Description of Artificial Sequence: Synthetic oligonucleotide
  modified_base 1..2: mod_base = cm
  modified_base 1..3: mod_base = OTHER; note = Phosphorothioate internucleotide linkage
  modified_base 3: mod_base = OTHER; note = 2-prime-fluoroguanosine
  modified_base 4: mod_base = OTHER; note = 2-prime-O-methyladenosine
  modified_base 5: mod_base = OTHER; note = 2-prime-fluorocytidine
  modified_base 6: mod_base = OTHER; note = 2-prime-O-methyladenosine
  modified_base 7: mod_base = OTHER; note = 2-prime-fluoroguanosine
  modified_base 8: mod_base = um
  modified_base 9: mod_base = OTHER; note = 2-prime-fluorouridine
  modified_base 10: mod_base = cm
  modified_base 11: mod_base = um
  modified_base 12: mod_base = gm
  modified_base 13: mod_base = OTHER; note = 2-prime-fluoroadenosine
  modified_base 13..15: mod_base = OTHER; note = Phosphorothioate internucleotide linkage
  modified_base 14..15: mod_base = OTHER; note = 2-prime-O-methyladenosine
  source 1..15: mol_type = other RNA
ccgacagttctgaaa

SEQ ID NO: 468 - RNA, 15 nt, synthetic construct
  misc_feature 1..15: note = Description of Artificial Sequence: Synthetic oligonucleotide
  modified_base 1: mod_base = cm
  modified_base 1..3: mod_base = OTHER; note = Phosphorothioate internucleotide linkage
  modified_base 2: mod_base = OTHER; note = 2-prime-O-methyladenosine
  modified_base 3: mod_base = OTHER; note = 2-prime-fluorouridine
  modified_base 4: mod_base = gm
  modified_base 5: mod_base = OTHER; note = 2-prime-fluorouridine
  modified_base 6: mod_base = OTHER; note = 2-prime-O-methyladenosine
  modified_base 7: mod_base = OTHER; note = 2-prime-fluorocytidine
  modified_base 8: mod_base = OTHER; note = 2-prime-O-methyladenosine
  modified_base 9: mod_base = OTHER; note = 2-prime-fluorocytidine
  modified_base 10: mod_base = OTHER; note = 2-prime-O-methyladenosine
  modified_base 11..12: mod_base = gm
  modified_base 13: mod_base = OTHER; note = 2-prime-fluoroadenosine
  modified_base 13..15: mod_base = OTHER; note = Phosphorothioate internucleotide linkage
  modified_base 14..15: mod_base = OTHER; note = 2-prime-O-methyladenosine
  source 1..15: mol_type = other RNA
catgtacacaggaaa

SEQ ID NO: 469 - RNA, 15 nt, synthetic construct
  misc_feature 1..15: note = Description of Artificial Sequence: Synthetic oligonucleotide
  modified_base 1..3: mod_base = OTHER; note = Phosphorothioate internucleotide linkage
  modified_base 1..2: mod_base = OTHER; note = 2-prime-O-methyladenosine
  modified_base 3: mod_base = OTHER; note = 2-prime-fluorocytidine
  modified_base 4: mod_base = um
  modified_base 5: mod_base = OTHER; note = 2-prime-fluorocytidine
  modified_base 6: mod_base = um
  modified_base 7: mod_base = OTHER; note = 2-prime-fluoroadenosine
  modified_base 8: mod_base = cm
  modified_base 9: mod_base = OTHER; note = 2-prime-fluoroadenosine
  modified_base 10: mod_base = OTHER; note = 2-prime-O-methyladenosine
  modified_base 11..12: mod_base = gm
  modified_base 13..15: mod_base = OTHER; note = Phosphorothioate internucleotide linkage
  modified_base 13: mod_base = OTHER; note = 2-prime-fluoroadenosine
  modified_base 14..15: mod_base = OTHER; note = 2-prime-O-methyladenosine
  source 1..15: mol_type = other RNA
aactctacaaggaaa

SEQ ID NO: 470 - RNA, 15 nt, synthetic construct
  misc_feature 1..15: note = Description of Artificial Sequence: Synthetic oligonucleotide
  modified_base 1..3: mod_base = OTHER; note = Phosphorothioate internucleotide linkage
  modified_base 1: mod_base = gm
  modified_base 2: mod_base = OTHER; note = 2-prime-O-methyladenosine
  modified_base 3: mod_base = OTHER; note = 2-prime-fluorocytidine
  modified_base 4: mod_base = um
  modified_base 5: mod_base = OTHER; note = 2-prime-fluorocytidine
  modified_base 6: mod_base = OTHER; note = 2-prime-O-methyladenosine
  modified_base 7: mod_base = OTHER; note = 2-prime-fluorouridine
  modified_base 8: mod_base = cm
  modified_base 9: mod_base = OTHER; note = 2-prime-fluorocytidine
  modified_base 10: mod_base = OTHER; note = 2-prime-O-methyladenosine
  modified_base 11: mod_base = gm
  modified_base 12: mod_base = um
  modified_base 13..15: mod_base = OTHER; note = Phosphorothioate internucleotide linkage
  modified_base 13: mod_base = OTHER; note = 2-prime-fluoroadenosine
  modified_base 14: mod_base = cm
  modified_base 15: mod_base = OTHER; note = 2-prime-O-methyladenosine
  source 1..15: mol_type = other RNA
gactcatccagtaca

SEQ ID NO: 471 - RNA, 15 nt, synthetic construct
  misc_feature 1..15: note = Description of Artificial Sequence: Synthetic oligonucleotide
  modified_base 1: mod_base = cm
  modified_base 1..3: mod_base = OTHER; note = Phosphorothioate internucleotide linkage
  modified_base 2: mod_base = um
  modified_base 3: mod_base = OTHER; note = 2-prime-fluoroadenosine
  modified_base 4: mod_base = cm
  modified_base 5: mod_base = OTHER; note = 2-prime-fluoroadenosine
  modified_base 6: mod_base = OTHER; note = 2-prime-O-methyladenosine
  modified_base 7: mod_base = OTHER; note = 2-prime-fluoroguanosine
  modified_base 8: mod_base = gm
  modified_base 9: mod_base = OTHER; note = 2-prime-fluoroadenosine
  modified_base 10..11: mod_base = OTHER; note = 2-prime-O-methyladenosine
  modified_base 12: mod_base = um
  modified_base 13: mod_base = OTHER; note = 2-prime-fluorouridine
  modified_base 13..15: mod_base = OTHER; note = Phosphorothioate internucleotide linkage
  modified_base 14..15: mod_base = OTHER; note = 2-prime-O-methyladenosine
  source 1..15: mol_type = other RNA
ctacaaggaaattaa

SEQ ID NO: 472 - RNA, 15 nt, synthetic construct
  misc_feature 1..15: note = Description of Artificial Sequence: Synthetic oligonucleotide
  modified_base 1: mod_base = OTHER; note = 2-prime-O-methyladenosine
  modified_base 1..3: mod_base = OTHER; note = Phosphorothioate internucleotide linkage
  modified_base 2: mod_base = gm
  modified_base 3: mod_base = OTHER; note = 2-prime-fluorocytidine
  modified_base 4: mod_base = OTHER; note = 2-prime-O-methyladenosine
  modified_base 5: mod_base = OTHER; note = 2-prime-fluoroguanosine
  modified_base 6: mod_base = um
  modified_base 7: mod_base = OTHER; note = 2-prime-fluorouridine
  modified_base 8: mod_base = um
  modified_base 9: mod_base = OTHER; note = 2-prime-fluoroguanosine
  modified_base 10..11: mod_base = OTHER; note = 2-prime-O-methyladenosine
  modified_base 12: mod_base = um
  modified_base 13: mod_base = OTHER; note = 2-prime-fluoroadenosine
  modified_base 13..15: mod_base = OTHER; note = Phosphorothioate internucleotide linkage
  modified_base 14: mod_base = cm
  modified_base 15: mod_base = OTHER; note = 2-prime-O-methyladenosine
  source 1..15: mol_type = other RNA
agcagtttgaataca

SEQ ID NO: 473 - RNA, 15 nt, synthetic construct
  misc_feature 1..15: note = Description of Artificial Sequence: Synthetic oligonucleotide
  modified_base 1: mod_base = cm
  modified_base 1..3: mod_base = OTHER; note = Phosphorothioate internucleotide linkage
  modified_base 2: mod_base = OTHER; note = 2-prime-O-methyladenosine
  modified_base 3: mod_base = OTHER; note = 2-prime-fluoroguanosine
  modified_base 4: mod_base = cm
  modified_base 5: mod_base = OTHER; note = 2-prime-fluoroadenosine
  modified_base 6: mod_base = OTHER; note = 2-prime-O-methyladenosine
  modified_base 7: mod_base = OTHER; note = 2-prime-fluoroadenosine
  modified_base 8: mod_base = cm
  modified_base 9: mod_base = OTHER; note = 2-prime-fluorouridine
  modified_base 10: mod_base = cm
  modified_base 11: mod_base = um
  modified_base 12: mod_base = OTHER; note = 2-prime-O-methyladenosine
  modified_base 13: mod_base = OTHER; note = 2-prime-fluorocytidine
  modified_base 13..15: mod_base = OTHER; note = Phosphorothioate internucleotide linkage
  modified_base 14..15: mod_base = OTHER; note = 2-prime-O-methyladenosine
  source 1..15: mol_type = other RNA
cagcaaactctacaa

SEQ ID NO: 474 - RNA, 15 nt, synthetic construct
  misc_feature 1..15: note = Description of Artificial Sequence: Synthetic oligonucleotide
  modified_base 1: mod_base = cm
  modified_base 1..3: mod_base = OTHER; note = Phosphorothioate internucleotide linkage
  modified_base 2: mod_base = OTHER; note = 2-prime-O-methyladenosine
  modified_base 3: mod_base = OTHER; note = 2-prime-fluoroguanosine
  modified_base 4: mod_base = gm
  modified_base 5: mod_base = OTHER; note = 2-prime-fluoroadenosine
  modified_base 6: mod_base = OTHER; note = 2-prime-O-methyladenosine
  modified_base 7: mod_base = OTHER; note = 2-prime-fluoroadenosine
  modified_base 8: mod_base = gm
  modified_base 9: mod_base = OTHER; note = 2-prime-fluoroguanosine
  modified_base 10: mod_base = OTHER; note = 2-prime-O-methyladenosine
  modified_base 11: mod_base = gm
  modified_base 12: mod_base = OTHER; note = 2-prime-O-methyladenosine
  modified_base 13: mod_base = OTHER; note = 2-prime-fluoroadenosine
  modified_base 13..15: mod_base = OTHER; note = Phosphorothioate internucleotide linkage
  modified_base 14..15: mod_base = OTHER; note = 2-prime-O-methyladenosine
  source 1..15: mol_type = other RNA
caggaaaggagaaaa

SEQ ID NO: 475 - RNA, 15 nt, synthetic construct
  misc_feature 1..15: note = Description of Artificial Sequence: Synthetic oligonucleotide
  modified_base 1..2: mod_base = cm
  modified_base 1..3: mod_base = OTHER; note = Phosphorothioate internucleotide linkage
  modified_base 3: mod_base = OTHER; note = 2-prime-fluorocytidine
  modified_base 4: mod_base = cm
  modified_base 5: mod_base = OTHER; note = 2-prime-fluorouridine
  modified_base 6: mod_base = gm
  modified_base 7: mod_base = OTHER; note = 2-prime-fluorocytidine
  modified_base 8: mod_base = um
  modified_base 9: mod_base = OTHER; note = 2-prime-fluoroguanosine
  modified_base 10: mod_base = cm
  modified_base 11: mod_base = OTHER; note = 2-prime-O-methyladenosine
  modified_base 12: mod_base = gm
  modified_base 13: mod_base = OTHER; note = 2-prime-fluoroadenosine
  modified_base 13..15: mod_base = OTHER; note = Phosphorothioate internucleotide linkage
  modified_base 14..15: mod_base = OTHER; note = 2-prime-O-methyladenosine
  source 1..15: mol_type = other RNA
cccctgctgcagaaa

SEQ ID NO: 476 - RNA, 15 nt, synthetic construct
  misc_feature 1..15: note = Description of Artificial Sequence: Synthetic oligonucleotide
  modified_base 1: mod_base = cm
  modified_base 1..3: mod_base = OTHER; note = Phosphorothioate internucleotide linkage
  modified_base 2: mod_base = um
  modified_base 3: mod_base = OTHER; note = 2-prime-fluoroadenosine
  modified_base 4: mod_base = cm
  modified_base 5: mod_base = OTHER; note = 2-prime-fluorocytidine
  modified_base 6: mod_base = OTHER; note = 2-prime-O-methyladenosine
  modified_base 7: mod_base = OTHER; note = 2-prime-fluoroadenosine
  modified_base 8: mod_base = gm
  modified_base 9: mod_base = OTHER; note = 2-prime-fluorocytidine
  modified_base 10: mod_base = OTHER; note = 2-prime-O-methyladenosine
  modified_base 11: mod_base = um
  modified_base 12: mod_base = cm
  modified_base 13: mod_base = OTHER; note = 2-prime-fluoroadenosine
  modified_base 13..15: mod_base = OTHER; note = Phosphorothioate internucleotide linkage
  modified_base 14: mod_base = cm
  modified_base 15: mod_base = OTHER; note = 2-prime-O-methyladenosine
  source 1..15: mol_type = other RNA
ctaccaagcatcaca

SEQ ID NO: 477 - RNA, 15 nt, synthetic construct
  misc_feature 1..15: note = Description of Artificial Sequence: Synthetic oligonucleotide
  modified_base 1: mod_base = um
  modified_base 1..3: mod_base = OTHER; note = Phosphorothioate internucleotide linkage
  modified_base 2: mod_base = gm
  modified_base 3: mod_base = OTHER; note = 2-prime-fluoroguanosine
  modified_base 4: mod_base = cm
  modified_base 5: mod_base = OTHER; note = 2-prime-fluoroadenosine
  modified_base 6: mod_base = OTHER; note = 2-prime-O-methyladenosine
  modified_base 7: mod_base = OTHER; note = 2-prime-fluorocytidine
  modified_base 8: mod_base = um
  modified_base 9: mod_base = OTHER; note = 2-prime-fluorouridine
  modified_base 10: mod_base = um
  modified_base 11: mod_base = gm
  modified_base 12: mod_base = cm
  modified_base 13: mod_base = OTHER; note = 2-prime-fluoroguanosine
  modified_base 13..15: mod_base = OTHER; note = Phosphorothioate internucleotide linkage
  modified_base 14..15: mod_base = OTHER; note = 2-prime-O-methyladenosine
  source 1..15: mol_type = other RNA
tggcaactttgcgaa

SEQ ID NO: 478 - RNA, 15 nt, synthetic construct
  misc_feature 1..15: note = Description of Artificial Sequence: Synthetic oligonucleotide
  modified_base 1: mod_base = gm
  modified_base 1..3: mod_base = OTHER; note = Phosphorothioate internucleotide linkage
  modified_base 2: mod_base = cm
  modified_base 3: mod_base = OTHER; note = 2-prime-fluorocytidine
  modified_base 4: mod_base = gm
  modified_base 5: mod_base = OTHER; note = 2-prime-fluoroadenosine
  modified_base 6: mod_base = gm
  modified_base 7: mod_base = OTHER; note = 2-prime-fluorocytidine
  modified_base 8: mod_base = OTHER; note = 2-prime-O-methyladenosine
  modified_base 9: mod_base = OTHER; note = 2-prime-fluoroguanosine
  modified_base 10: mod_base = OTHER; note = 2-prime-O-methyladenosine
  modified_base 11: mod_base = cm
  modified_base 12: mod_base = OTHER; note = 2-prime-O-methyladenosine
  modified_base 13: mod_base = OTHER; note = 2-prime-fluoroadenosine
  modified_base 13..15: mod_base = OTHER; note = Phosphorothioate internucleotide linkage
  modified_base 14: mod_base = gm
  modified_base 15: mod_base = OTHER; note = 2-prime-O-methyladenosine
  source 1..15: mol_type = other RNA
accgagcagacaaga

SEQ ID NO: 479 - RNA, 15 nt, synthetic construct
  misc_feature 1..15: note = Description of Artificial Sequence: Synthetic oligonucleotide
  modified_base 1..2: mod_base = um
  modified_base 3: mod_base = OTHER; note = 2-prime-fluoroguanosine
  modified_base 4: mod_base = cm
  modified_base 5: mod_base = OTHER; note = 2-prime-fluoroguanosine
  modified_base 6: mod_base = OTHER; note = 2-prime-O-methyladenosine
  modified_base 7: mod_base = OTHER; note = 2-prime-fluoroadenosine
  modified_base 8: mod_base = cm
  modified_base 9: mod_base = OTHER; note = 2-prime-fluoroguanosine
  modified_base 10: mod_base = OTHER; note = 2-prime-O-methyladenosine
  modified_base 11: mod_base = cm
  modified_base 12: mod_base = OTHER; note = 2-prime-O-methyladenosine
  modified_base 13: mod_base = OTHER; note = 2-prime-fluoroadenosine
  modified_base 14: mod_base = um
  modified_base 15: mod_base = OTHER; note = 2-prime-O-methyladenosine
  source 1..15: mol_type = other RNA
ttgcgaacgacaata

SEQ ID NO: 480 - RNA, 15 nt, synthetic construct
  misc_feature 1..15: note = Description of Artificial Sequence: Synthetic oligonucleotide
  modified_base 1: mod_base = cm
  modified_base 1..3: mod_base = OTHER; note = Phosphorothioate internucleotide linkage
  modified_base 2: mod_base = gm
  modified_base 3: mod_base = OTHER; note = 2-prime-fluoroadenosine
  modified_base 4: mod_base = um
  modified_base 5: mod_base = OTHER; note = 2-prime-fluorouridine
  modified_base 6: mod_base = OTHER; note = 2-prime-O-methyladenosine
  modified_base 7: mod_base = OTHER; note = 2-prime-fluorouridine
  modified_base 8: mod_base = cm
  modified_base 9: mod_base = OTHER; note = 2-prime-fluorocytidine
  modified_base 10: mod_base = cm
  modified_base 11..12: mod_base = OTHER; note = 2-prime-O-methyladenosine
  modified_base 13: mod_base = OTHER; note = 2-prime-fluoroadenosine
  modified_base 13..15: mod_base = OTHER; note = Phosphorothioate internucleotide linkage
  modified_base 14: mod_base = cm
  modified_base 15: mod_base = OTHER; note = 2-prime-O-methyladenosine
  source 1..15: mol_type = other RNA
cgattatcccaaaca

SEQ ID NO: 481 - RNA, 15 nt, synthetic construct
  misc_feature 1..15: note = Description of Artificial Sequence: Synthetic oligonucleotide
  modified_base 1..2: mod_base = cm
  modified_base 1..3: mod_base = OTHER; note = Phosphorothioate internucleotide linkage
  modified_base 3: mod_base = OTHER; note = 2-prime-fluorouridine
  modified_base 4: mod_base = cm
  modified_base 6: mod_base = OTHER; note = 2-prime-O-methyladenosine
  modified_base 7: mod_base = OTHER; note = 2-prime-fluorouridine
  modified_base 8: mod_base = cm
  modified_base 9: mod_base = OTHER; note = 2-prime-fluoroadenosine
  modified_base 9: mod_base = OTHER; note = 2-prime-fluoroadenosine
  modified_base 10: mod_base = um
  modified_base 11: mod_base = OTHER; note = 2-prime-O-methyladenosine
  modified_base 12: mod_base = cm
  modified_base 13: mod_base = OTHER; note = 2-prime-fluoroadenosine
  modified_base 13..15: mod_base = OTHER; note = Phosphorothioate internucleotide linkage
  modified_base 14: mod_base = gm
  modified_base 15: mod_base = OTHER; note = 2-prime-O-methyladenosine
  source 1..15: mol_type = other RNA
cctccatcatacaga

SEQ ID NO: 482 - RNA, 15 nt, synthetic construct
  misc_feature 1..15: note = Description of Artificial Sequence: Synthetic oligonucleotide
  modified_base 1: mod_base = gm
  modified_base 1..3: mod_base = OTHER; note = Phosphorothioate internucleotide linkage
  modified_base 2: mod_base = cm
  modified_base 3: mod_base = OTHER; note = 2-prime-fluoroadenosine
  modified_base 4: mod_base = OTHER; note = 2-prime-O-methyladenosine
  modified_base 5: mod_base = OTHER; note = 2-prime-fluoroguanosine
  modified_base 6: mod_base = OTHER; note = 2-prime-O-methyladenosine
  modified_base 7: mod_base = OTHER; note = 2-prime-fluoroguanosine
  modified_base 8: mod_base = cm
  modified_base 9: mod_base = OTHER; note = 2-prime-fluoroguanosine
  modified_base 10..11: mod_base = gm
  modified_base 12: mod_base = um
  modified_base 13: mod_base = OTHER; note = 2-prime-fluoroadenosine
  modified_base 13..15: mod_base = OTHER; note = Phosphorothioate internucleotide linkage
  modified_base 14: mod_base = cm
  modified_base 15: mod_base = OTHER; note = 2-prime-O-methyladenosine
  source 1..15: mol_type = other RNA
gcaagagcgggtaca

SEQ ID NO: 483 - RNA, 15 nt, synthetic construct
  misc_feature 1..15: note = Description of Artificial Sequence: Synthetic oligonucleotide
  modified_base 1..2: mod_base = gm
  modified_base 1..3: mod_base = OTHER; note = Phosphorothioate internucleotide linkage
  modified_base 3: mod_base = OTHER; note = 2-prime-fluorocytidine
  modified_base 4: mod_base = um
  modified_base 5: mod_base = OTHER; note = 2-prime-fluoroguanosine
  modified_base 6: mod_base = OTHER; note = 2-prime-O-methyladenosine
  modified_base 7: mod_base = OTHER; note = 2-prime-fluorouridine
  modified_base 8: mod_base = gm
  modified_base 9: mod_base = OTHER; note = 2-prime-fluorocytidine
  modified_base 10: mod_base = OTHER; note = 2-prime-O-methyladenosine
  modified_base 11..12: mod_base = gm
  modified_base 13: mod_base = OTHER; note = 2-prime-fluoroadenosine
  modified_base 13..15: mod_base = OTHER; note = Phosphorothioate internucleotide linkage
  modified_base 14..15: mod_base = OTHER; note = 2-prime-O-methyladenosine
  source 1..15: mol_type = other RNA
ggctgatgcaggaaa

SEQ ID NO: 484 - RNA, 15 nt, synthetic construct
  misc_feature 1..15: note = Description of Artificial Sequence: Synthetic oligonucleotide
  modified_base 1..3: mod_base = OTHER; note = Phosphorothioate internucleotide linkage
  modified_base 1: mod_base = cm
  modified_base 2: mod_base = um
  modified_base 3: mod_base = OTHER; note = 2-prime-fluorouridine
  modified_base 4: mod_base = um
  modified_base 5: mod_base = OTHER; note = 2-prime-fluoroguanosine
  modified_base 6: mod_base = OTHER; note = 2-prime-O-methyladenosine
  modified_base 7: mod_base = OTHER; note = 2-prime-fluorouridine
  modified_base 8: mod_base = gm
  modified_base 9: mod_base = OTHER; note = 2-prime-fluoroguanosine
  modified_base 10: mod_base = OTHER; note = 2-prime-O-methyladenosine
  modified_base 11: mod_base = cm
  modified_base 12: mod_base = um
  modified_base 13: mod_base = OTHER; note = 2-prime-fluorocytidine
  modified_base 13..15: mod_base = OTHER; note = Phosphorothioate internucleotide linkage
  modified_base 14: mod_base = um
  modified_base 15: mod_base = OTHER; note = 2-prime-O-methyladenosine
  source 1..15: mol_type = other RNA
ctttgatggactcta

SEQ ID NO: 485 - RNA, 15 nt, synthetic construct
  misc_feature 1..15: note = Description of Artificial Sequence: Synthetic oligonucleotide
  modified_base 1: mod_base = cm
  modified_base 1..3: mod_base = OTHER; note = Phosphorothioate internucleotide linkage
  modified_base 2: mod_base = gm
  modified_base 3: mod_base = OTHER; note = 2-prime-fluorocytidine
  modified_base 4: mod_base = um
  modified_base 5: mod_base = OTHER; note = 2-prime-fluoroadenosine
  modified_base 6: mod_base = um
  modified_base 7: mod_base = OTHER; note = 2-prime-fluoroguanosine
  modified_base 8: mod_base = gm
  modified_base 9: mod_base = OTHER; note = 2-prime-fluoroadenosine
  modified_base 10: mod_base = OTHER; note = 2-prime-O-methyladenosine
  modified_base 11: mod_base = cm
  modified_base 12: mod_base = um
  modified_base 13: mod_base = OTHER; note = 2-prime-fluorouridine
  modified_base 13..15: mod_base = OTHER; note = Phosphorothioate internucleotide linkage
  modified_base 14: mod_base = um
  modified_base 15: mod_base = OTHER; note = 2-prime-O-methyladenosine
  source 1..15: mol_type = other RNA
cgctatggaacttta

SEQ ID NO: 486 - RNA, 15 nt, synthetic construct
  misc_feature 1..15: note = Description of Artificial Sequence: Synthetic oligonucleotide
  modified_base 1: mod_base = gm
  modified_base 1..3: mod_base = OTHER; note = Phosphorothioate internucleotide linkage
  modified_base 2: mod_base = um
  modified_base 3: mod_base = OTHER; note = 2-prime-fluorocytidine
  modified_base 4: mod_base = cm
  modified_base 5: mod_base = OTHER; note = 2-prime-fluorouridine
  modified_base 6: mod_base = um
  modified_base 7: mod_base = OTHER; note = 2-prime-fluorouridine
  modified_base 8: mod_base = cm
  modified_base 9: mod_base = OTHER; note = 2-prime-fluoroadenosine
  modified_base 10: mod_base = OTHER; note = 2-prime-O-methyladenosine
  modified_base 11: mod_base = gm
  modified_base 12: mod_base = OTHER; note = 2-prime-O-methyladenosine
  modified_base 13: mod_base = OTHER; note = 2-prime-fluoroadenosine
  modified_base 13..15: mod_base = OTHER; note = Phosphorothioate internucleotide linkage
  modified_base 14..15: mod_base = OTHER; note = 2-prime-O-methyladenosine
  source 1..15: mol_type = other RNA
gtcctttcaagaaaa

SEQ ID NO: 487 - RNA, 15 nt, synthetic construct
  misc_feature 1..15: note = Description of Artificial Sequence: Synthetic oligonucleotide
  modified_base 1: mod_base = cm
  modified_base 1..3: mod_base = OTHER; note = Phosphorothioate internucleotide linkage
  modified_base 2: mod_base = OTHER; note = 2-prime-O-methyladenosine
  modified_base 3: mod_base = OTHER; note = 2-prime-fluorouridine
  modified_base 4: mod_base = OTHER; note = 2-prime-O-methyladenosine
  modified_base 5: mod_base = OTHER; note = 2-prime-fluoroadenosine
  modified_base 6: mod_base = OTHER; note = 2-prime-O-methyladenosine
  modified_base 7: mod_base = OTHER; note = 2-prime-fluoroadenosine
  modified_base 8: mod_base = gm
  modified_base 9: mod_base = OTHER; note = 2-prime-fluorocytidine
  modified_base 10: mod_base = OTHER; note = 2-prime-O-methyladenosine
  modified_base 11: mod_base = cm
  modified_base 12: mod_base = um
  modified_base 13: mod_base = OTHER; note = 2-prime-fluoroguanosine
  modified_base 13..15: mod_base = OTHER; note = Phosphorothioate internucleotide linkage
  modified_base 14..15: mod_base = OTHER; note = 2-prime-O-methyladenosine
  source 1..15: mol_type = other RNA
cataaaagcactgaa

SEQ ID NO: 488 - RNA, 15 nt, synthetic construct
  misc_feature 1..15: note = Description of Artificial Sequence: Synthetic oligonucleotide
  modified_base 1..3: mod_base = OTHER; note = Phosphorothioate internucleotide linkage
  modified_base 1: mod_base = cm
  modified_base 1..3: mod_base = OTHER; note = Phosphorothioate internucleotide linkage
  modified_base 2: mod_base = gm
  modified_base 3: mod_base = OTHER; note = 2-prime-fluoroguanosine
  modified_base 4: mod_base = OTHER; note = 2-prime-O-methyladenosine
  modified_base 5: mod_base = OTHER; note = 2-prime-fluoroguanosine
  modified_base 6: mod_base = um
  modified_base 7: mod_base = OTHER; note = 2-prime-fluorouridine
  modified_base 8: mod_base = cm
  modified_base 9: mod_base = OTHER; note = 2-prime-fluoroadenosine
  modified_base 10: mod_base = OTHER; note = 2-prime-O-methyladenosine
  modified_base 11..12: mod_base = cm
  modified_base 13..15: mod_base = OTHER; note = Phosphorothioate internucleotide linkage
  modified_base 13: mod_base = OTHER; note = 2-prime-fluorouridine
  modified_base 13..15: mod_base = OTHER; note = Phosphorothioate internucleotide linkage
  modified_base 14: mod_base = gm
  modified_base 15: mod_base = OTHER; note = 2-prime-O-methyladenosine
  source 1..15: mol_type = other RNA
cggagttcaacctga

SEQ ID NO: 489 - RNA, 15 nt, synthetic construct
  misc_feature 1..15: note = Description of Artificial Sequence: Synthetic oligonucleotide
  modified_base 1: mod_base = gm
  modified_base 1..3: mod_base = OTHER; note = Phosphorothioate internucleotide linkage
  modified_base 2: mod_base = cm
  modified_base 3: mod_base = OTHER; note = 2-prime-fluoroadenosine
  modified_base 4: mod_base = gm
  modified_base 5: mod_base = OTHER; note = 2-prime-fluoroguanosine
  modified_base 6: mod_base = OTHER; note = 2-prime-O-methyladenosine
  modified_base 7: mod_base = OTHER; note = 2-prime-fluorocytidine
  modified_base 8: mod_base = OTHER; note = 2-prime-O-methyladenosine
  modified_base 9: mod_base = OTHER; note = 2-prime-fluorouridine
  modified_base 10: mod_base = um
  modified_base 11..12: mod_base = gm
  modified_base 13: mod_base = OTHER; note = 2-prime-fluoroguanosine
  modified_base 13..15: mod_base = OTHER; note = Phosphorothioate internucleotide linkage
  modified_base 14..15: mod_base = OTHER; note = 2-prime-O-methyladenosine
  source 1..15: mol_type = other RNA
gcaggacattgggaa

SEQ ID NO: 490 - RNA, 15 nt, synthetic construct
  misc_feature 1..15: note = Description of Artificial Sequence: Synthetic oligonucleotide
  modified_base 1..2: mod_base = um
  modified_base 1..3: mod_base = OTHER; note = Phosphorothioate internucleotide linkage
  modified_base 3: mod_base = OTHER; note = 2-prime-fluorocytidine
  modified_base 4: mod_base = OTHER; note = 2-prime-O-methyladenosine
  modified_base 5: mod_base = OTHER; note = 2-prime-fluoroadenosine
  modified_base 6: mod_base = gm
  modified_base 7: mod_base = OTHER; note = 2-prime-fluoroadenosine
  modified_base 8: mod_base = OTHER; note = 2-prime-O-methyladenosine
  modified_base 9: mod_base = OTHER; note = 2-prime-fluoroadenosine
  modified_base 10: mod_base = OTHER; note = 2-prime-O-methyladenosine
  modified_base 11: mod_base = cm
  modified_base 12: mod_base = OTHER; note = 2-prime-O-methyladenosine
  modified_base 13: mod_base = OTHER; note = 2-prime-fluoroadenosine
  modified_base 13..15: mod_base = OTHER; note = Phosphorothioate internucleotide linkage
  modified_base 14..15: mod_base = OTHER; note = 2-prime-O-methyladenosine
  source 1..15: mol_type = other RNA
ttcaagaaaacaaaa

SEQ ID NO: 491 - RNA, 15 nt, synthetic construct
  misc_feature 1..15: note = Description of Artificial Sequence: Synthetic oligonucleotide
  modified_base 1: mod_base = gm
  modified_base 1..3: mod_base = OTHER; note = Phosphorothioate internucleotide linkage
  modified_base 2: mod_base = OTHER; note = 2-prime-O-methyladenosine
  modified_base 3: mod_base = OTHER; note = 2-prime-fluorocytidine
  modified_base 4: mod_base = OTHER; note = 2-prime-O-methyladenosine
  modified_base 5: mod_base = OTHER; note = 2-prime-fluoroadenosine
  modified_base 6: mod_base = um
  modified_base 7: mod_base = OTHER; note = 2-prime-fluoroguanosine
  modified_base 8: mod_base = OTHER; note = 2-prime-O-methyladenosine
  modified_base 9: mod_base = OTHER; note = 2-prime-fluoroguanosine
  modified_base 10: mod_base = OTHER; note = 2-prime-O-methyladenosine
  modified_base 11..12: mod_base = um
  modified_base 13: mod_base = OTHER; note = 2-prime-fluoroadenosine
  modified_base 13..15: mod_base = OTHER; note = Phosphorothioate internucleotide linkage
  modified_base 14..15: mod_base = OTHER; note = 2-prime-O-methyladenosine
  source 1..15: mol_type = other RNA
gacaatgagattaaa

SEQ ID NO: 492 - RNA, 15 nt, synthetic construct
  misc_feature 1..15: note = Description of Artificial Sequence: Synthetic oligonucleotide
  modified_base 1: mod_base = cm
  modified_base 1..3: mod_base = OTHER; note = Phosphorothioate internucleotide linkage
  modified_base 2: mod_base = um
  modified_base 3: mod_base = OTHER; note = 2-prime-fluorocytidine
  modified_base 4: mod_base = um
  modified_base 5: mod_base = OTHER; note = 2-prime-fluoroguanosine
  modified_base 6: mod_base = gm
  modified_base 7: mod_base = OTHER; note = 2-prime-fluorocytidine
  modified_base 8: mod_base = gm
  modified_base 9: mod_base = OTHER; note = 2-prime-fluoroguanosine
  modified_base 10: mod_base = OTHER; note = 2-prime-O-methyladenosine
  modified_base 11: mod_base = cm
  modified_base 12: mod_base = um
  modified_base 13: mod_base = OTHER; note = 2-prime-fluoroguanosine
  modified_base 13..15: mod_base = OTHER; note = Phosphorothioate internucleotide linkage
  modified_base 14: mod_base = cm
  modified_base 15: mod_base = OTHER; note = 2-prime-O-methyladenosine
  source 1..15: mol_type = other RNA
ctctggcggactgca

SEQ ID NO: 493 - RNA, 15 nt, synthetic construct
  misc_feature 1..15: note = Description of Artificial Sequence: Synthetic oligonucleotide
  modified_base 1: mod_base = gm
  modified_base 1..3: mod_base = OTHER; note = Phosphorothioate internucleotide linkage
  modified_base 2: mod_base = cm
  modified_base 3: mod_base = OTHER; note = 2-prime-fluoroadenosine
  modified_base 4: mod_base = cm
  modified_base 5: mod_base = OTHER; note = 2-prime-fluoroguanosine
  modified_base 6: mod_base = OTHER; note = 2-prime-O-methyladenosine
  modified_base 7: mod_base = OTHER; note = 2-prime-fluorocytidine
  modified_base 8: mod_base = gm
  modified_base 9: mod_base = OTHER; note = 2-prime-fluorouridine
  modified_base 10..11: mod_base = cm
  modified_base 12: mod_base = um
  modified_base 13: mod_base = OTHER; note = 2-prime-fluoroguanosine
  modified_base 13..15: mod_base = OTHER; note = Phosphorothioate internucleotide linkage
  modified_base 14..15: mod_base = OTHER; note = 2-prime-O-methyladenosine
  source 1..15: mol_type = other RNA
gcacgacgtcctgaa

SEQ ID NO: 494 - RNA, 15 nt, synthetic construct
  misc_feature 1..15: note = Description of Artificial Sequence: Synthetic oligonucleotide
  modified_base 1: mod_base = gm
  modified_base 1..3: mod_base = OTHER; note = Phosphorothioate internucleotide linkage
  modified_base 2: mod_base = cm
  modified_base 3: mod_base = OTHER; note = 2-prime-fluorouridine
  modified_base 4: mod_base = um
  modified_base 5: mod_base = OTHER; note = 2-prime-fluorouridine
  modified_base 6: mod_base = um
  modified_base 7: mod_base = OTHER; note = 2-prime-fluoroguanosine
  modified_base 8: mod_base = gm
  modified_base 9: mod_base = OTHER; note = 2-prime-fluorocytidine
  modified_base 10: mod_base = cm
  modified_base 11: mod_base = gm
  modified_base 12: mod_base = cm
  modified_base 13: mod_base = OTHER; note = 2-prime-fluoroadenosine
  modified_base 13..15: mod_base = OTHER; note = Phosphorothioate internucleotide linkage
  modified_base 14..15: mod_base = OTHER; note = 2-prime-O-methyladenosine
  source 1..15: mol_type = other RNA
gcttttggccgcaaa

SEQ ID NO: 495 - RNA, 15 nt, synthetic construct
  misc_feature 1..15: note = Description of Artificial Sequence: Synthetic oligonucleotide
  modified_base 1: mod_base = um
  modified_base 1..3: mod_base = OTHER; note = Phosphorothioate internucleotide linkage
  modified_base 2: mod_base = gm
  modified_base 3: mod_base = OTHER; note = 2-prime-fluorocytidine
  modified_base 4: mod_base = um
  modified_base 5: mod_base = OTHER; note = 2-prime-fluoroguanosine
  modified_base 6: mod_base = OTHER; note = 2-prime-O-methyladenosine
  modified_base 7: mod_base = OTHER; note = 2-prime-fluoroadenosine
  modified_base 8: mod_base = gm
  modified_base 9: mod_base = OTHER; note = 2-prime-fluorocytidine
  modified_base 10: mod_base = OTHER; note = 2-prime-O-methyladenosine
  modified_base 11: mod_base = gm
  modified_base 12: mod_base = um
  modified_base 13: mod_base = OTHER; note = 2-prime-fluorouridine
  modified_base 13..15: mod_base = OTHER; note = Phosphorothioate internucleotide linkage
  modified_base 14: mod_base = um
  modified_base 15: mod_base = OTHER; note = 2-prime-O-methyladenosine
  source 1..15: mol_type = other RNA
tgctgaagcagttta

SEQ ID NO: 496 - RNA, 15 nt, synthetic construct
  misc_feature 1..15: note = Description of Artificial Sequence: Synthetic oligonucleotide
  modified_base 1: mod_base = cm
  modified_base 1..3: mod_base = OTHER; note = Phosphorothioate internucleotide linkage
  modified_base 2: mod_base = OTHER; note = 2-prime-O-methyladenosine
  modified_base 3: mod_base = OTHER; note = 2-prime-fluoroguanosine
  modified_base 4: mod_base = um
  modified_base 5: mod_base = OTHER; note = 2-prime-fluoroguanosine
  modified_base 6: mod_base = OTHER; note = 2-prime-O-methyladenosine
  modified_base 7: mod_base = OTHER; note = 2-prime-fluorouridine
  modified_base 8: mod_base = gm
  modified_base 9: mod_base = OTHER; note = 2-prime-fluoroadenosine
  modified_base 10: mod_base = cm
  modified_base 11: mod_base = gm
  modified_base 12: mod_base = cm
  modified_base 13: mod_base = OTHER; note = 2-prime-fluoroadenosine
  modified_base 13..15: mod_base = OTHER; note = Phosphorothioate internucleotide linkage
  modified_base 14: mod_base = gm
  modified_base 15: mod_base = OTHER; note = 2-prime-O-methyladenosine
  source 1..15: mol_type = other RNA
cagtgatgacgcaga

SEQ ID NO: 497 - RNA, 15 nt, synthetic construct
  misc_feature 1..15: note = Description of Artificial Sequence: Synthetic oligonucleotide
  modified_base 1: mod_base = cm
  modified_base 1..3: mod_base = OTHER; note = Phosphorothioate internucleotide linkage
  modified_base 2: mod_base = OTHER; note = 2-prime-O-methyladenosine
  modified_base 3: mod_base = OTHER; note = 2-prime-fluorouridine
  modified_base 4: mod_base = cm
  modified_base 5: mod_base = OTHER; note = 2-prime-fluorouridine
  modified_base 6: mod_base = OTHER; note = 2-prime-O-methyladenosine
  modified_base 7: mod_base = OTHER; note = 2-prime-fluorocytidine
  modified_base 8: mod_base = cm
  modified_base 9: mod_base = OTHER; note = 2-prime-fluoroguanosine
  modified_base 10: mod_base = cm
  modified_base 11: mod_base = OTHER; note = 2-prime-O-methyladenosine
  modified_base 12: mod_base = um
  modified_base 13: mod_base = OTHER; note = 2-prime-fluorocytidine
  modified_base 13..15: mod_base = OTHER; note = Phosphorothioate internucleotide linkage
  modified_base 14..15: mod_base = OTHER; note = 2-prime-O-methyladenosine
  source 1..15: mol_type = other RNA
catctaccgcatcaa

SEQ ID NO: 498 - RNA, 15 nt, synthetic construct
  misc_feature 1..15: note = Description of Artificial Sequence: Synthetic oligonucleotide
  modified_base 1: mod_base = gm
  modified_base 1..3: mod_base = OTHER; note = Phosphorothioate internucleotide linkage
  modified_base 2: mod_base = cm
  modified_base 3: mod_base = OTHER; note = 2-prime-fluoroadenosine
  modified_base 4: mod_base = um
  modified_base 5: mod_base = OTHER; note = 2-prime-fluoroguanosine
  modified_base 6: mod_base = um
  modified_base 7: mod_base = OTHER; note = 2-prime-fluoroadenosine
  modified_base 8: mod_base = cm
  modified_base 9: mod_base = OTHER; note = 2-prime-fluoroadenosine
  modified_base 10: mod_base = cm
  modified_base 11: mod_base = OTHER; note = 2-prime-O-methyladenosine
  modified_base 12: mod_base = gm
  modified_base 13: mod_base = OTHER; note = 2-prime-fluoroguanosine
  modified_base 13..15: mod_base = OTHER; note = Phosphorothioate internucleotide linkage
  modified_base 14..15: mod_base = OTHER; note = 2-prime-O-methyladenosine
  source 1..15: mol_type = other RNA
gcatgtacacaggaa

SEQ ID NO: 499 - RNA, 15 nt, synthetic construct
  misc_feature 1..15: note = Description of Artificial Sequence: Synthetic oligonucleotide
  modified_base 1: mod_base = cm
  modified_base 1..3: mod_base = OTHER; note = Phosphorothioate internucleotide linkage
  modified_base 2: mod_base = OTHER; note = 2-prime-O-methyladenosine
  modified_base 3: mod_base = OTHER; note = 2-prime-fluoroguanosine
  modified_base 4: mod_base = cm
  modified_base 5: mod_base = OTHER; note = 2-prime-fluoroguanosine
  modified_base 6: mod_base = OTHER; note = 2-prime-O-methyladenosine
  modified_base 7: mod_base = OTHER; note = 2-prime-fluorouridine
  modified_base 8: mod_base = cm
  modified_base 9: mod_base = OTHER; note = 2-prime-fluorocytidine
  modified_base 10: mod_base = cm
  modified_base 11: mod_base = um
  modified_base 12: mod_base = OTHER; note = 2-prime-O-methyladenosine
  modified_base 13: mod_base = OTHER; note = 2-prime-fluoroadenosine
  modified_base 13..15: mod_base = OTHER; note = Phosphorothioate internucleotide linkage
  modified_base 14..15: mod_base = OTHER; note = 2-prime-O-methyladenosine
  source 1..15: mol_type = other RNA
cagcgatccctaaaa

SEQ ID NO: 500 - RNA, 15 nt, synthetic construct
  misc_feature 1..15: note = Description of Artificial Sequence: Synthetic oligonucleotide
  modified_base 1: mod_base = um
  modified_base 1..3: mod_base = OTHER; note = Phosphorothioate internucleotide linkage
  modified_base 2: mod_base = cm
  modified_base 3: mod_base = OTHER; note = 2-prime-fluorouridine
  modified_base 4: mod_base = gm
  modified_base 5: mod_base = OTHER; note = 2-prime-fluoroguanosine
  modified_base 6: mod_base = gm
  modified_base 7: mod_base = OTHER; note = 2-prime-fluorocytidine
  modified_base 8: mod_base = OTHER; note = 2-prime-O-methyladenosine
  modified_base 9: mod_base = OTHER; note = 2-prime-fluorouridine
  modified_base 10: mod_base = cm
  modified_base 11: mod_base = gm
  modified_base 12: mod_base = cm
  modified_base 13: mod_base = OTHER; note = 2-prime-fluorouridine
  modified_base 13..15: mod_base = OTHER; note = Phosphorothioate internucleotide linkage
  modified_base 14..15: mod_base = OTHER; note = 2-prime-O-methyladenosine
  source 1..15: mol_type = other RNA
tctgggcatcgctaa

SEQ ID NO: 501 - RNA, 15 nt, synthetic construct
  misc_feature 1..15: note = Description of Artificial Sequence: Synthetic oligonucleotide
  modified_base 1: mod_base = gm
  modified_base 1..3: mod_base = OTHER; note = Phosphorothioate internucleotide linkage
  modified_base 2: mod_base = um
  modified_base 3: mod_base = OTHER; note = 2-prime-fluoroguanosine
  modified_base 4: mod_base = cm
  modified_base 5: mod_base = OTHER; note = 2-prime-fluoroguanosine
  modified_base 6: mod_base = OTHER; note = 2-prime-O-methyladenosine
  modified_base 7: mod_base = OTHER; note = 2-prime-fluorocytidine
  modified_base 8: mod_base = cm
  modified_base 9: mod_base = OTHER; note = 2-prime-fluoroguanosine
  modified_base 10: mod_base = OTHER; note = 2-prime-O-methyladenosine
  modified_base 11..12: mod_base = gm
  modified_base 13: mod_base = OTHER; note = 2-prime-fluoroadenosine
  modified_base 13..15: mod_base = OTHER; note = Phosphorothioate internucleotide linkage
  modified_base 14: mod_base = cm
  modified_base 15: mod_base = OTHER; note = 2-prime-O-methyladenosine
  source 1..15: mol_type = other RNA
gtgcgaccgaggaca

SEQ ID NO: 502 - RNA, 15 nt, synthetic construct
  misc_feature 1..15: note = Description of Artificial Sequence: Synthetic oligonucleotide
  modified_base 1: mod_base = cm
  modified_base 1..3: mod_base = OTHER; note = Phosphorothioate internucleotide linkage
  modified_base 2: mod_base = OTHER; note = 2-prime-O-methyladenosine
  modified_base 3: mod_base = OTHER; note = 2-prime-fluorocytidine
  modified_base 4: mod_base = um
  modified_base 5: mod_base = OTHER; note = 2-prime-fluoroguanosine
  modified_base 6: mod_base = OTHER; note = 2-prime-O-methyladenosine
  modified_base 7: mod_base = OTHER; note = 2-prime-fluoroadenosine
  modified_base 8: mod_base = gm
  modified_base 9: mod_base = OTHER; note = 2-prime-fluorocytidine
  modified_base 10: mod_base = OTHER; note = 2-prime-O-methyladenosine
  modified_base 11: mod_base = gm
  modified_base 12: mod_base = um
  modified_base 13: mod_base = OTHER; note = 2-prime-fluoroadenosine
  modified_base 13..15: mod_base = OTHER; note = Phosphorothioate internucleotide linkage
  modified_base 14: mod_base = cm
  modified_base 15: mod_base = OTHER; note = 2-prime-O-methyladenosine
  source 1..15: mol_type = other RNA
cactgaagcagtaca

SEQ ID NO: 503 - RNA, 15 nt, synthetic construct
  misc_feature 1..15: note = Description of Artificial Sequence: Synthetic oligonucleotide
  modified_base 1..3: mod_base = OTHER; note = Phosphorothioate internucleotide linkage
  modified_base 1: mod_base = OTHER; note = 2-prime-O-methyladenosine
  modified_base 2: mod_base = gm
  modified_base 3: mod_base = OTHER; note = 2-prime-fluorouridine
  modified_base 4: mod_base = um
  modified_base 5: mod_base = OTHER; note = 2-prime-fluorocytidine
  modified_base 6: mod_base = OTHER; note = 2-prime-O-methyladenosine
  modified_base 7: mod_base = OTHER; note = 2-prime-fluorouridine
  modified_base 8: mod_base = cm
  modified_base 9: mod_base = OTHER; note = 2-prime-fluorouridine
  modified_base 10: mod_base = OTHER; note = 2-prime-O-methyladenosine
  modified_base 11..12: mod_base = cm
  modified_base 13..15: mod_base = OTHER; note = Phosphorothioate internucleotide linkage
  modified_base 13: mod_base = OTHER; note = 2-prime-fluoroguanosine
  modified_base 13: mod_base = OTHER; note = 2-prime-fluoroguanosine
  modified_base 14: mod_base = cm
  modified_base 15: mod_base = OTHER; note = 2-prime-O-methyladenosine
  source 1..15: mol_type = other RNA
agttcatctaccgca

SEQ ID NO: 504 - RNA, 15 nt, synthetic construct
  misc_feature 1..15: note = Description of Artificial Sequence: Synthetic oligonucleotide
  modified_base 1: mod_base = um
  modified_base 1..3: mod_base = OTHER; note = Phosphorothioate internucleotide linkage
  modified_base 2: mod_base = cm
  modified_base 3: mod_base = OTHER; note = 2-prime-fluorouridine
  modified_base 4: mod_base = gm
  modified_base 5: mod_base = OTHER; note = 2-prime-fluorocytidine
  modified_base 6: mod_base = um
  modified_base 7: mod_base = OTHER; note = 2-prime-fluorocytidine
  modified_base 8: mod_base = cm
  modified_base 9: mod_base = OTHER; note = 2-prime-fluoroadenosine
  modified_base 10: mod_base = OTHER; note = 2-prime-O-methyladenosine
  modified_base 11: mod_base = cm
  modified_base 12: mod_base = um
  modified_base 13: mod_base = OTHER; note = 2-prime-fluoroguanosine
  modified_base 13..15: mod_base = OTHER; note = Phosphorothioate internucleotide linkage
  modified_base 14: mod_base = gm
  modified_base 15: mod_base = OTHER; note = 2-prime-O-methyladenosine
  source 1..15: mol_type = other RNA
tctgctccaactgga

SEQ ID NO: 505 - RNA, 15 nt, synthetic construct
  misc_feature 1..15: note = Description of Artificial Sequence: Synthetic oligonucleotide
  modified_base 1..2: mod_base = cm
  modified_base 1..3: mod_base = OTHER; note = Phosphorothioate internucleotide linkage
  modified_base 3: mod_base = OTHER; note = 2-prime-fluoroadenosine
  modified_base 4: mod_base = um
  modified_base 5: mod_base = OTHER; note = 2-prime-fluorocytidine
  modified_base 6: mod_base = um
  modified_base 7: mod_base = OTHER; note = 2-prime-fluoroguanosine
  modified_base 8: mod_base = cm
  modified_base 9: mod_base = OTHER; note = 2-prime-fluorouridine
  modified_base 10: mod_base = um
  modified_base 11..12: mod_base = gm
  modified_base 13: mod_base = OTHER; note = 2-prime-fluoroadenosine
  modified_base 13..15: mod_base = OTHER; note = Phosphorothioate internucleotide linkage
  modified_base 14: mod_base = gm
  modified_base 15: mod_base = OTHER; note = 2-prime-O-methyladenosine
  source 1..15: mol_type = other RNA
ccatctgcttggaga

SEQ ID NO: 506 - RNA, 15 nt, synthetic construct
  misc_feature 1..15: note = Description of Artificial Sequence: Synthetic oligonucleotide
  modified_base 1: mod_base = gm
  modified_base 1..3: mod_base = OTHER; note = Phosphorothioate internucleotide linkage
  modified_base 2: mod_base = OTHER; note = 2-prime-O-methyladenosine
  modified_base 3: mod_base = OTHER; note = 2-prime-fluoroguanosine
  modified_base 4: mod_base = gm
  modified_base 5: mod_base = OTHER; note = 2-prime-fluorocytidine
  modified_base 6: mod_base = um
  modified_base 7: mod_base = OTHER; note = 2-prime-fluorocytidine
  modified_base 8: mod_base = gm
  modified_base 9: mod_base = OTHER; note = 2-prime-fluorouridine
  modified_base 10..12: mod_base = cm
  modified_base 13: mod_base = OTHER; note = 2-prime-fluoroadenosine
  modified_base 13..15: mod_base = OTHER; note = Phosphorothioate internucleotide linkage
  modified_base 14..15: mod_base = OTHER; note = 2-prime-O-methyladenosine
  source 1..15: mol_type = other RNA
gaggctcgtcccaaa

SEQ ID NO: 507 - RNA, 15 nt, synthetic construct
  misc_feature 1..15: note = Description of Artificial Sequence: Synthetic oligonucleotide
  modified_base 1: mod_base = gm
  modified_base 1..3: mod_base = OTHER; note = Phosphorothioate internucleotide linkage
  modified_base 2: mod_base = um
  modified_base 3: mod_base = OTHER; note = 2-prime-fluorouridine
  modified_base 4: mod_base = gm
  modified_base 5: mod_base = OTHER; note = 2-prime-fluorocytidine
  modified_base 6: mod_base = OTHER; note = 2-prime-O-methyladenosine
  modified_base 7: mod_base = OTHER; note = 2-prime-fluoroguanosine
  modified_base 8: mod_base = cm
  modified_base 9: mod_base = OTHER; note = 2-prime-fluorouridine
  modified_base 10: mod_base = OTHER; note = 2-prime-O-methyladenosine
  modified_base 11: mod_base = gm
  modified_base 12: mod_base = OTHER; note = 2-prime-O-methyladenosine
  modified_base 13: mod_base = OTHER; note = 2-prime-fluoroadenosine
  modified_base 13..15: mod_base = OTHER; note = Phosphorothioate internucleotide linkage
  modified_base 14: mod_base = cm
  modified_base 15: mod_base = OTHER; note = 2-prime-O-methyladenosine (
  source 1..15: mol_type = other RNA
gttgcagctagaaca

SEQ ID NO: 508 - RNA, 15 nt, synthetic construct
  misc_feature 1..15: note = Description of Artificial Sequence: Synthetic oligonucleotide
  modified_base 1: mod_base = cm
  modified_base 1..3: mod_base = OTHER; note = Phosphorothioate internucleotide linkage
  modified_base 2: mod_base = OTHER; note = 2-prime-O-methyladenosine
  modified_base 3: mod_base = OTHER; note = 2-prime-fluoroguanosine
  modified_base 4: mod_base = cm
  modified_base 5: mod_base = OTHER; note = 2-prime-fluoroadenosine
  modified_base 6: mod_base = gm
  modified_base 7: mod_base = OTHER; note = 2-prime-fluorouridine
  modified_base 8: mod_base = um
  modified_base 9: mod_base = OTHER; note = 2-prime-fluoroguanosine
  modified_base 10: mod_base = cm
  modified_base 11: mod_base = um
  modified_base 12: mod_base = gm
  modified_base 13: mod_base = OTHER; note = 2-prime-fluoroadenosine
  modified_base 13..15: mod_base = OTHER; note = Phosphorothioate internucleotide linkage
  modified_base 14..15: mod_base = OTHER; note = 2-prime-O-methyladenosine
  source 1..15: mol_type = other RNA
cagcagttgctgaaa

SEQ ID NO: 509 - RNA, 15 nt, synthetic construct
  misc_feature 1..15: note = Description of Artificial Sequence: Synthetic oligonucleotide
  modified_base 1..3: mod_base = OTHER; note = Phosphorothioate internucleotide linkage
  modified_base 1: mod_base = cm
  modified_base 2: mod_base = OTHER; note = 2-prime-O-methyladenosine
  modified_base 3: mod_base = OTHER; note = 2-prime-fluorocytidine
  modified_base 4: mod_base = OTHER; note = 2-prime-O-methyladenosine
  modified_base 5: mod_base = OTHER; note = 2-prime-fluoroguanosine
  modified_base 6: mod_base = OTHER; note = 2-prime-O-methyladenosine
  modified_base 7: mod_base = OTHER; note = 2-prime-fluoroguanosine
  modified_base 8: mod_base = OTHER; note = 2-prime-O-methyladenosine
  modified_base 9: mod_base = OTHER; note = 2-prime-fluorocytidine
  modified_base 10: mod_base = OTHER; note = 2-prime-O-methyladenosine
  modified_base 11..12: mod_base = cm
  modified_base 13..15: mod_base = OTHER; note = Phosphorothioate internucleotide linkage
  modified_base 13: mod_base = OTHER; note = 2-prime-fluoroadenosine
  modified_base 14: mod_base = gm
  modified_base 15: mod_base = OTHER; note = 2-prime-O-methyladenosine
  source 1..15: mol_type = other RNA
cacagagacaccaga

SEQ ID NO: 510 - RNA, 15 nt, synthetic construct
  misc_feature 1..15: note = Description of Artificial Sequence: Synthetic oligonucleotide
  modified_base 1: mod_base = um
  modified_base 1..3: mod_base = OTHER; note = Phosphorothioate internucleotide linkage
  modified_base 2: mod_base = cm
  modified_base 3: mod_base = OTHER; note = 2-prime-fluoroadenosine
  modified_base 4: mod_base = gm
  modified_base 5: mod_base = OTHER; note = 2-prime-fluorocytidine
  modified_base 6: mod_base = OTHER; note = 2-prime-O-methyladenosine
  modified_base 7: mod_base = OTHER; note = 2-prime-fluoroadenosine
  modified_base 8: mod_base = OTHER; note = 2-prime-O-methyladenosine
  modified_base 9: mod_base = OTHER; note = 2-prime-fluorocytidine
  modified_base 10: mod_base = um
  modified_base 11: mod_base = cm
  modified_base 12: mod_base = um
  modified_base 13: mod_base = OTHER; note = 2-prime-fluoroadenosine
  modified_base 13..15: mod_base = OTHER; note = Phosphorothioate internucleotide linkage
  modified_base 14: mod_base = cm
  modified_base 15: mod_base = OTHER; note = 2-prime-O-methyladenosine
  source 1..15: mol_type = other RNA
tcagcaaactctaca

SEQ ID NO: 511 - RNA, 15 nt, synthetic construct
  misc_feature 1..15: note = Description of Artificial Sequence: Synthetic oligonucleotide
  modified_base 1: mod_base = gm
  modified_base 1..3: mod_base = OTHER; note = Phosphorothioate internucleotide linkage
  modified_base 2: mod_base = um
  modified_base 3: mod_base = OTHER; note = 2-prime-fluoroguanosine
  modified_base 4: mod_base = OTHER; note = 2-prime-O-methyladenosine
  modified_base 5: mod_base = OTHER; note = 2-prime-fluoroguanosine
  modified_base 6: mod_base = um
  modified_base 7: mod_base = OTHER; note = 2-prime-fluorocytidine
  modified_base 8: mod_base = cm
  modified_base 9: mod_base = OTHER; note = 2-prime-fluorocytidine
  modified_base 10..11: mod_base = OTHER; note = 2-prime-O-methyladenosine
  modified_base 12: mod_base = gm
  modified_base 13: mod_base = OTHER; note = 2-prime-fluoroadenosine
  modified_base 13..15: mod_base = OTHER; note = Phosphorothioate internucleotide linkage
  modified_base 14..15: mod_base = OTHER; note = 2-prime-O-methyladenosine
  source 1..15: mol_type = other RNA
gtgagtcccaagaaa

SEQ ID NO: 512 - RNA, 15 nt, synthetic construct
  misc_feature 1..15: note = Description of Artificial Sequence: Synthetic oligonucleotide
  modified_base 1: mod_base = um
  modified_base 1..3: mod_base = OTHER; note = Phosphorothioate internucleotide linkage
  modified_base 2: mod_base = gm
  modified_base 3: mod_base = OTHER; note = 2-prime-fluoroadenosine
  modified_base 4: mod_base = cm
  modified_base 5: mod_base = OTHER; note = 2-prime-fluoroadenosine
  modified_base 6: mod_base = OTHER; note = 2-prime-O-methyladenosine
  modified_base 7: mod_base = OTHER; note = 2-prime-fluorouridine
  modified_base 8: mod_base = cm
  modified_base 9: mod_base = OTHER; note = 2-prime-fluorouridine
  modified_base 10: mod_base = gm
  modified_base 11: mod_base = um
  modified_base 12: mod_base = gm
  modified_base 13: mod_base = OTHER; note = 2-prime-fluoroadenosine
  modified_base 13..15: mod_base = OTHER; note = Phosphorothioate internucleotide linkage
  modified_base 14..15: mod_base = OTHER; note = 2-prime-O-methyladenosine
  source 1..15: mol_type = other RNA
tgacaatctgtgaaa

SEQ ID NO: 513 - RNA, 15 nt, synthetic construct
  misc_feature 1..15: note = Description of Artificial Sequence: Synthetic oligonucleotide
  modified_base 1..2: mod_base = gm
  modified_base 1..3: mod_base = OTHER; note = Phosphorothioate internucleotide linkage
  misc_feature 3: note = 7modified_base - 2-prime-fluorocytidine
  modified_base 4: mod_base = cm
  misc_feature 5: note = 7modified_base - 2-prime-fluoroadenosine
  modified_base 6: mod_base = gm
  modified_base 7: mod_base = OTHER; note = 2-prime-fluorouridine
  modified_base 8: mod_base = cm
  misc_feature 9: note = 7modified_base - 2-prime-fluorocytidine
  modified_base 10: mod_base = OTHER; note = 2-prime-O-methyladenosine
  modified_base 11: mod_base = cm
  modified_base 12: mod_base = um
  misc_feature 13: note = 7modified_base - 2-prime-fluoroguanosine
  modified_base 13..15: mod_base = OTHER; note = Phosphorothioate internucleotide linkage
  modified_base 14..15: mod_base = OTHER; note = 2-prime-O-methyladenosine
  source 1..15: mol_type = other RNA
ggccagtccactgaa

SEQ ID NO: 514 - RNA, 15 nt, synthetic construct
  misc_feature 1..15: note = Description of Artificial Sequence: Synthetic oligonucleotide
  modified_base 1: mod_base = gm
  modified_base 1..3: mod_base = OTHER; note = Phosphorothioate internucleotide linkage
  modified_base 2: mod_base = OTHER; note = 2-prime-O-methyladenosine
  modified_base 3: mod_base = OTHER; note = 2-prime-fluorouridine
  modified_base 4: mod_base = cm
  modified_base 5: mod_base = OTHER; note = 2-prime-fluorocytidine
  modified_base 6: mod_base = um
  modified_base 7: mod_base = OTHER; note = 2-prime-fluoroguanosine
  modified_base 8: mod_base = gm
  modified_base 9: mod_base = OTHER; note = 2-prime-fluoroguanosine
  modified_base 10: mod_base = OTHER; note = 2-prime-O-methyladenosine
  modified_base 11: mod_base = um
  modified_base 12: mod_base = OTHER; note = 2-prime-O-methyladenosine
  modified_base 13: mod_base = OTHER; note = 2-prime-fluorocytidine
  modified_base 13..15: mod_base = OTHER; note = Phosphorothioate internucleotide linkage
  modified_base 14: mod_base = cm
  modified_base 15: mod_base = OTHER; note = 2-prime-O-methyladenosine
  source 1..15: mol_type = other RNA
gatcctgggatacca

SEQ ID NO: 515 - RNA, 20 nt, synthetic construct
  misc_feature 1..20: note = Description of Artificial Sequence: Synthetic oligonucleotide
  source 1..20: mol_type = other RNA
ttaatctctttactgatata

SEQ ID NO: 516 - RNA, 15 nt, synthetic construct
  misc_feature 1..15: note = Description of Artificial Sequence: Synthetic oligonucleotide
  source 1..15: mol_type = other RNA
cagtaaagagattaa

SEQ ID NO: 517 - protein, 111 aa, synthetic construct
  REGION 1..111: note = Description of Artificial Sequence: Synthetic polypeptide
QQQQQQQQQQQQQQQQQQQQQQQQQQQQQQQQQQQQQQQQQQQQQQQQQQQQQQQQQQQQQQQQQQQQQQQQQQQQQQQQQQQQQQQQQQQQQQQQQQQQQQQQQQQQQQQ

SEQ ID NO: 518 - RNA, 20 nt, synthetic construct
  misc_feature 1..20: note = Description of Artificial Sequence: Synthetic oligonucleotide
  source 1..20: mol_type = other RNA
catttcatttagttcatgat

SEQ ID NO: 519 - RNA, 20 nt, synthetic construct
  misc_feature 1..20: note = Description of Artificial Sequence: Synthetic oligonucleotide
  source 1..20: mol_type = other RNA
gcaggcgtttgaatgagttg

SEQ ID NO: 520 - RNA, 20 nt, synthetic construct
  misc_feature 1..20: note = Description of Artificial Sequence: Synthetic oligonucleotide
  source 1..20: mol_type = other RNA
gatctcagctcactaaaacc

SEQ ID NO: 521 - RNA, 20 nt, synthetic construct
  misc_feature 1..20: note = Description of Artificial Sequence: Synthetic oligonucleotide
  source 1..20: mol_type = other RNA
ccttgcatttccgtacgaat

SEQ ID NO: 522 - RNA, 20 nt, synthetic construct
  misc_feature 1..20: note = Description of Artificial Sequence: Synthetic oligonucleotide
  source 1..20: mol_type = other RNA
gttccaatagaattttatta

SEQ ID NO: 523 - RNA, 20 nt, synthetic construct
  misc_feature 1..20: note = Description of Artificial Sequence: Synthetic oligonucleotide
  source 1..20: mol_type = other RNA
cccatcacctccatttcctg

SEQ ID NO: 524 - DNA, 45 bp, synthetic construct
  misc_feature 1..45: note = Polynucleotide
  source 1..45: mol_type = other DNA
ggagccgctgcaccgactgagtttgggcccgctgcagctccctgt

SEQ ID NO: 525 - DNA, 45 bp, synthetic construct
  misc_feature 1..45: note = Polynucleotide
  source 1..45: mol_type = other DNA
agccgctgcaccgactgagtttgggcccgctgcagctccctgtcc

SEQ ID NO: 526 - DNA, 45 bp, synthetic construct
  misc_feature 1..45: note = Polynucleotide
  source 1..45: mol_type = other DNA
gctgcaccgactgagtttgggcccgctgcagctccctgtcccggc

SEQ ID NO: 527 - DNA, 45 bp, synthetic construct
  misc_feature 1..45: note = Polynucleotide
  source 1..45: mol_type = other DNA
ccgactgagtttgggcccgctgcagctccctgtcccggcgggtcc

SEQ ID NO: 528 - DNA, 45 bp, synthetic construct
  misc_feature 1..45: note = Polynucleotide
  source 1..45: mol_type = other DNA
ttgggcccgctgcagctccctgtcccggcgggtcccaggctacgg

SEQ ID NO: 529 - DNA, 45 bp, synthetic construct
  misc_feature 1..45: note = Polynucleotide
  source 1..45: mol_type = other DNA
agctccctgtcccggcgggtcccaggctacggcggggatggcggt

SEQ ID NO: 530 - DNA, 45 bp, synthetic construct
  misc_feature 1..45: note = Polynucleotide
  source 1..45: mol_type = other DNA
ctccctgtcccggcgggtcccaggctacggcggggatggcggtaa

SEQ ID NO: 531 - DNA, 45 bp, synthetic construct
  misc_feature 1..45: note = Polynucleotide
  source 1..45: mol_type = other DNA
cctgtcccggcgggtcccaggctacggcggggatggcggtaaccc

SEQ ID NO: 532 - DNA, 45 bp, synthetic construct
  misc_feature 1..45: note = Polynucleotide
  source 1..45: mol_type = other DNA
ctgtcccggcgggtcccaggctacggcggggatggcggtaaccct

SEQ ID NO: 533 - DNA, 45 bp, synthetic construct
  misc_feature 1..45: note = Polynucleotide
  source 1..45: mol_type = other DNA
cggcgggtcccaggctacggcggggatggcggtaaccctgcagcc

SEQ ID NO: 534 - DNA, 45 bp, synthetic construct
  misc_feature 1..45: note = Polynucleotide
  source 1..45: mol_type = other DNA
ggcgggtcccaggctacggcggggatggcggtaaccctgcagcct

SEQ ID NO: 535 - DNA, 45 bp, synthetic construct
  misc_feature 1..45: note = Polynucleotide
  source 1..45: mol_type = other DNA
gtcccaggctacggcggggatggcggtaaccctgcagcctgcggg

SEQ ID NO: 536 - DNA, 45 bp, synthetic construct
  misc_feature 1..45: note = Polynucleotide
  source 1..45: mol_type = other DNA
ccaggctacggcggggatggcggtaaccctgcagcctgcgggccg

SEQ ID NO: 537 - DNA, 45 bp, synthetic construct
  misc_feature 1..45: note = Polynucleotide
  source 1..45: mol_type = other DNA
ggctacggcggggatggcggtaaccctgcagcctgcgggccggcg

SEQ ID NO: 538 - DNA, 45 bp, synthetic construct
  misc_feature 1..45: note = Polynucleotide
  source 1..45: mol_type = other DNA
gctacggcggggatggcggtaaccctgcagcctgcgggccggcga

SEQ ID NO: 539 - DNA, 45 bp, synthetic construct
  misc_feature 1..45: note = Polynucleotide
  source 1..45: mol_type = other DNA
tacggcggggatggcggtaaccctgcagcctgcgggccggcgaca

SEQ ID NO: 540 - DNA, 45 bp, synthetic construct
  misc_feature 1..45: note = Polynucleotide
  source 1..45: mol_type = other DNA
taaccctgcagcctgcgggccggcgacacgaacccccggccccgc

SEQ ID NO: 541 - DNA, 45 bp, synthetic construct
  misc_feature 1..45: note = Polynucleotide
  source 1..45: mol_type = other DNA
gacacgaacccccggccccgcagagacagagtgacccagcaaccc

SEQ ID NO: 542 - DNA, 45 bp, synthetic construct
  misc_feature 1..45: note = Polynucleotide
  source 1..45: mol_type = other DNA
acgaacccccggccccgcagagacagagtgacccagcaacccaga

SEQ ID NO: 543 - DNA, 45 bp, synthetic construct
  misc_feature 1..45: note = Polynucleotide
  source 1..45: mol_type = other DNA
cccccggccccgcagagacagagtgacccagcaacccagagccca

SEQ ID NO: 544 - DNA, 45 bp, synthetic construct
  misc_feature 1..45: note = Polynucleotide
  source 1..45: mol_type = other DNA
gacagagtgacccagcaacccagagcccatgagggacacccgccc

SEQ ID NO: 545 - DNA, 45 bp, synthetic construct
  misc_feature 1..45: note = Polynucleotide
  source 1..45: mol_type = other DNA
tgacccagcaacccagagcccatgagggacacccgccccctcctg

SEQ ID NO: 546 - DNA, 45 bp, synthetic construct
  misc_feature 1..45: note = Polynucleotide
  source 1..45: mol_type = other DNA
aggccttcccccacttcagccccgctccctcacttgggtcttccc

SEQ ID NO: 547 - DNA, 45 bp, synthetic construct
  misc_feature 1..45: note = Polynucleotide
  source 1..45: mol_type = other DNA
ggccttcccccacttcagccccgctccctcacttgggtcttccct

SEQ ID NO: 548 - DNA, 45 bp, synthetic construct
  misc_feature 1..45: note = Polynucleotide
  source 1..45: mol_type = other DNA
gccttcccccacttcagccccgctccctcacttgggtcttccctt

SEQ ID NO: 549 - DNA, 45 bp, synthetic construct
  misc_feature 1..45: note = Polynucleotide
  source 1..45: mol_type = other DNA
ccttcccccacttcagccccgctccctcacttgggtcttcccttg

SEQ ID NO: 550 - DNA, 45 bp, synthetic construct
  misc_feature 1..45: note = Polynucleotide
  source 1..45: mol_type = other DNA
ttcccccacttcagccccgctccctcacttgggtcttcccttgtc

SEQ ID NO: 551 - DNA, 45 bp, synthetic construct
  misc_feature 1..45: note = Polynucleotide
  source 1..45: mol_type = other DNA
cccccacttcagccccgctccctcacttgggtcttcccttgtcct

SEQ ID NO: 552 - DNA, 45 bp, synthetic construct
  misc_feature 1..45: note = Polynucleotide
  source 1..45: mol_type = other DNA
ccccacttcagccccgctccctcacttgggtcttcccttgtcctc

SEQ ID NO: 553 - DNA, 45 bp, synthetic construct
  misc_feature 1..45: note = Polynucleotide
  source 1..45: mol_type = other DNA
ccacttcagccccgctccctcacttgggtcttcccttgtcctctc

SEQ ID NO: 554 - DNA, 45 bp, synthetic construct
  misc_feature 1..45: note = Polynucleotide
  source 1..45: mol_type = other DNA
cagccccgctccctcacttgggtcttcccttgtcctctcgcgagg

SEQ ID NO: 555 - DNA, 45 bp, synthetic construct
  misc_feature 1..45: note = Polynucleotide
  source 1..45: mol_type = other DNA
ccccgctccctcacttgggtcttcccttgtcctctcgcgagggga

SEQ ID NO: 556 - DNA, 45 bp, synthetic construct
  misc_feature 1..45: note = Polynucleotide
  source 1..45: mol_type = other DNA
gctccctcacttgggtcttcccttgtcctctcgcgaggggaggca

SEQ ID NO: 557 - DNA, 45 bp, synthetic construct
  misc_feature 1..45: note = Polynucleotide
  source 1..45: mol_type = other DNA
ctccctcacttgggtcttcccttgtcctctcgcgaggggaggcag

SEQ ID NO: 558 - DNA, 45 bp, synthetic construct
  misc_feature 1..45: note = Polynucleotide
  source 1..45: mol_type = other DNA
tccctcacttgggtcttcccttgtcctctcgcgaggggaggcaga

SEQ ID NO: 559 - DNA, 45 bp, synthetic construct
  misc_feature 1..45: note = Polynucleotide
  source 1..45: mol_type = other DNA
ccctcacttgggtcttcccttgtcctctcgcgaggggaggcagag

SEQ ID NO: 560 - DNA, 45 bp, synthetic construct
  misc_feature 1..45: note = Polynucleotide
  source 1..45: mol_type = other DNA
cccttgtcctctcgcgaggggaggcagagccttgttggggcctgt

SEQ ID NO: 561 - DNA, 45 bp, synthetic construct
  misc_feature 1..45: note = Polynucleotide
  source 1..45: mol_type = other DNA
ccttgtcctctcgcgaggggaggcagagccttgttggggcctgtc

SEQ ID NO: 562 - DNA, 45 bp, synthetic construct
  misc_feature 1..45: note = Polynucleotide
  source 1..45: mol_type = other DNA
ttgtcctctcgcgaggggaggcagagccttgttggggcctgtcct

SEQ ID NO: 563 - DNA, 45 bp, synthetic construct
  misc_feature 1..45: note = Polynucleotide
  source 1..45: mol_type = other DNA
tgtcctctcgcgaggggaggcagagccttgttggggcctgtcctg

SEQ ID NO: 564 - DNA, 45 bp, synthetic construct
  misc_feature 1..45: note = Polynucleotide
  source 1..45: mol_type = other DNA
gtcctctcgcgaggggaggcagagccttgttggggcctgtcctga

SEQ ID NO: 565 - DNA, 45 bp, synthetic construct
  misc_feature 1..45: note = Polynucleotide
  source 1..45: mol_type = other DNA
tcctctcgcgaggggaggcagagccttgttggggcctgtcctgaa

SEQ ID NO: 566 - DNA, 45 bp, synthetic construct
  misc_feature 1..45: note = Polynucleotide
  source 1..45: mol_type = other DNA
ctcgcgaggggaggcagagccttgttggggcctgtcctgaattca

SEQ ID NO: 567 - DNA, 45 bp, synthetic construct
  misc_feature 1..45: note = Polynucleotide
  source 1..45: mol_type = other DNA
tcgcgaggggaggcagagccttgttggggcctgtcctgaattcac

SEQ ID NO: 568 - DNA, 45 bp, synthetic construct
  misc_feature 1..45: note = Polynucleotide
  source 1..45: mol_type = other DNA
cgcgaggggaggcagagccttgttggggcctgtcctgaattcacc

SEQ ID NO: 569 - DNA, 45 bp, synthetic construct
  misc_feature 1..45: note = Polynucleotide
  source 1..45: mol_type = other DNA
cgaggggaggcagagccttgttggggcctgtcctgaattcaccga

SEQ ID NO: 570 - DNA, 45 bp, synthetic construct
  misc_feature 1..45: note = Polynucleotide
  source 1..45: mol_type = other DNA
gaggcagagccttgttggggcctgtcctgaattcaccgaggggag

SEQ ID NO: 571 - DNA, 45 bp, synthetic construct
  misc_feature 1..45: note = Polynucleotide
  source 1..45: mol_type = other DNA
aggcagagccttgttggggcctgtcctgaattcaccgaggggagt

SEQ ID NO: 572 - RNA, 20 nt, synthetic construct
  misc_feature 1..20: note = Polynucleotide
  source 1..20: mol_type = other RNA
actgagtttgggcccgctgc

SEQ ID NO: 573 - RNA, 20 nt, synthetic construct
  misc_feature 1..20: note = Polynucleotide
  source 1..20: mol_type = other RNA
tgagtttgggcccgctgcag

SEQ ID NO: 574 - RNA, 20 nt, synthetic construct
  misc_feature 1..20: note = Polynucleotide
  source 1..20: mol_type = other RNA
tttgggcccgctgcagctcc

SEQ ID NO: 575 - RNA, 20 nt, synthetic construct
  misc_feature 1..20: note = Polynucleotide
  source 1..20: mol_type = other RNA
cccgctgcagctccctgtcc

SEQ ID NO: 576 - RNA, 20 nt, synthetic construct
  misc_feature 1..20: note = Polynucleotide
  source 1..20: mol_type = other RNA
ctccctgtcccggcgggtcc

SEQ ID NO: 577 - RNA, 20 nt, synthetic construct
  misc_feature 1..20: note = Polynucleotide
  source 1..20: mol_type = other RNA
cgggtcccaggctacggcgg

SEQ ID NO: 578 - RNA, 20 nt, synthetic construct
  misc_feature 1..20: note = Polynucleotide
  source 1..20: mol_type = other RNA
ggtcccaggctacggcgggg

SEQ ID NO: 579 - RNA, 20 nt, synthetic construct
  misc_feature 1..20: note = Polynucleotide
  source 1..20: mol_type = other RNA
cccaggctacggcggggatg

SEQ ID NO: 580 - RNA, 20 nt, synthetic construct
  misc_feature 1..20: note = Polynucleotide
  source 1..20: mol_type = other RNA
ccaggctacggcggggatgg

SEQ ID NO: 581 - RNA, 20 nt, synthetic construct
  misc_feature 1..20: note = Polynucleotide
  source 1..20: mol_type = other RNA
tacggcggggatggcggtaa

SEQ ID NO: 582 - RNA, 20 nt, synthetic construct
  misc_feature 1..20: note = Polynucleotide
  source 1..20: mol_type = other RNA
acggcggggatggcggtaac

SEQ ID NO: 583 - RNA, 20 nt, synthetic construct
  misc_feature 1..20: note = Polynucleotide
  source 1..20: mol_type = other RNA
ggggatggcggtaaccctgc

SEQ ID NO: 584 - RNA, 20 nt, synthetic construct
  misc_feature 1..20: note = Polynucleotide
  source 1..20: mol_type = other RNA
gatggcggtaaccctgcagc

SEQ ID NO: 585 - RNA, 20 nt, synthetic construct
  misc_feature 1..20: note = Polynucleotide
  source 1..20: mol_type = other RNA
ggcggtaaccctgcagcctg

SEQ ID NO: 586 - RNA, 20 nt, synthetic construct
  misc_feature 1..20: note = Polynucleotide
  source 1..20: mol_type = other RNA
gcggtaaccctgcagcctgc

SEQ ID NO: 587 - RNA, 20 nt, synthetic construct
  misc_feature 1..20: note = Polynucleotide
  source 1..20: mol_type = other RNA
ggtaaccctgcagcctgcgg

SEQ ID NO: 588 - RNA, 20 nt, synthetic construct
  misc_feature 1..20: note = Polynucleotide
  source 1..20: mol_type = other RNA
cgggccggcgacacgaaccc

SEQ ID NO: 589 - RNA, 20 nt, synthetic construct
  misc_feature 1..20: note = Polynucleotide
  source 1..20: mol_type = other RNA
ccccgcagagacagagtgac

SEQ ID NO: 590 - RNA, 20 nt, synthetic construct
  misc_feature 1..20: note = Polynucleotide
  source 1..20: mol_type = other RNA
cgcagagacagagtgaccca

SEQ ID NO: 591 - RNA, 20 nt, synthetic construct
  misc_feature 1..20: note = Polynucleotide
  source 1..20: mol_type = other RNA
agacagagtgacccagcaac

SEQ ID NO: 592 - RNA, 20 nt, synthetic construct
  misc_feature 1..20: note = Polynucleotide
  source 1..20: mol_type = other RNA
caacccagagcccatgaggg

SEQ ID NO: 593 - RNA, 20 nt, synthetic construct
  misc_feature 1..20: note = Polynucleotide
  source 1..20: mol_type = other RNA
gagcccatgagggacacccg

SEQ ID NO: 594 - RNA, 20 nt, synthetic construct
  misc_feature 1..20: note = Polynucleotide
  source 1..20: mol_type = other RNA
tcagccccgctccctcactt

SEQ ID NO: 595 - RNA, 20 nt, synthetic construct
  misc_feature 1..20: note = Polynucleotide
  source 1..20: mol_type = other RNA
cagccccgctccctcacttg

SEQ ID NO: 596 - RNA, 20 nt, synthetic construct
  misc_feature 1..20: note = Polynucleotide
  source 1..20: mol_type = other RNA
agccccgctccctcacttgg

SEQ ID NO: 597 - RNA, 20 nt, synthetic construct
  misc_feature 1..20: note = Polynucleotide
  source 1..20: mol_type = other RNA
gccccgctccctcacttggg

SEQ ID NO: 598 - RNA, 20 nt, synthetic construct
  misc_feature 1..20: note = Polynucleotide
  source 1..20: mol_type = other RNA
cccgctccctcacttgggtc

SEQ ID NO: 599 - RNA, 20 nt, synthetic construct
  misc_feature 1..20: note = Polynucleotide
  source 1..20: mol_type = other RNA
cgctccctcacttgggtctt

SEQ ID NO: 600 - RNA, 20 nt, synthetic construct
  misc_feature 1..20: note = Polynucleotide
  source 1..20: mol_type = other RNA
gctccctcacttgggtcttc

SEQ ID NO: 601 - RNA, 20 nt, synthetic construct
  misc_feature 1..20: note = Polynucleotide
  source 1..20: mol_type = other RNA
tccctcacttgggtcttccc

SEQ ID NO: 602 - RNA, 20 nt, synthetic construct
  misc_feature 1..20: note = Polynucleotide
  source 1..20: mol_type = other RNA
acttgggtcttcccttgtcc

SEQ ID NO: 603 - RNA, 20 nt, synthetic construct
  misc_feature 1..20: note = Polynucleotide
  source 1..20: mol_type = other RNA
tgggtcttcccttgtcctct

SEQ ID NO: 604 - RNA, 20 nt, synthetic construct
  misc_feature 1..20: note = Polynucleotide
  source 1..20: mol_type = other RNA
tcttcccttgtcctctcgcg

SEQ ID NO: 605 - RNA, 20 nt, synthetic construct
  misc_feature 1..20: note = Polynucleotide
  source 1..20: mol_type = other RNA
cttcccttgtcctctcgcga

SEQ ID NO: 606 - RNA, 20 nt, synthetic construct
  misc_feature 1..20: note = Polynucleotide
  source 1..20: mol_type = other RNA
ttcccttgtcctctcgcgag

SEQ ID NO: 607 - RNA, 20 nt, synthetic construct
  misc_feature 1..20: note = Polynucleotide
  source 1..20: mol_type = other RNA
tcccttgtcctctcgcgagg

SEQ ID NO: 608 - RNA, 20 nt, synthetic construct
  misc_feature 1..20: note = Polynucleotide
  source 1..20: mol_type = other RNA
gaggggaggcagagccttgt

SEQ ID NO: 609 - RNA, 20 nt, synthetic construct
  misc_feature 1..20: note = Polynucleotide
  source 1..20: mol_type = other RNA
aggggaggcagagccttgtt

SEQ ID NO: 610 - RNA, 20 nt, synthetic construct
  misc_feature 1..20: note = Polynucleotide
  source 1..20: mol_type = other RNA
gggaggcagagccttgttgg

SEQ ID NO: 611 - RNA, 20 nt, synthetic construct
  misc_feature 1..20: note = Polynucleotide
  source 1..20: mol_type = other RNA
ggaggcagagccttgttggg

SEQ ID NO: 612 - RNA, 20 nt, synthetic construct
  misc_feature 1..20: note = Polynucleotide
  source 1..20: mol_type = other RNA
gaggcagagccttgttgggg

SEQ ID NO: 613 - RNA, 20 nt, synthetic construct
  misc_feature 1..20: note = Polynucleotide
  source 1..20: mol_type = other RNA
aggcagagccttgttggggc

SEQ ID NO: 614 - RNA, 20 nt, synthetic construct
  misc_feature 1..20: note = Polynucleotide
  source 1..20: mol_type = other RNA
agagccttgttggggcctgt

SEQ ID NO: 615 - RNA, 20 nt, synthetic construct
  misc_feature 1..20: note = Polynucleotide
  source 1..20: mol_type = other RNA
gagccttgttggggcctgtc

SEQ ID NO: 616 - RNA, 20 nt, synthetic construct
  misc_feature 1..20: note = Polynucleotide
  source 1..20: mol_type = other RNA
agccttgttggggcctgtcc

SEQ ID NO: 617 - RNA, 20 nt, synthetic construct
  misc_feature 1..20: note = Polynucleotide
  source 1..20: mol_type = other RNA
ccttgttggggcctgtcctg

SEQ ID NO: 618 - RNA, 20 nt, synthetic construct
  misc_feature 1..20: note = Polynucleotide
  source 1..20: mol_type = other RNA
tggggcctgtcctgaattca

SEQ ID NO: 619 - RNA, 20 nt, synthetic construct
  misc_feature 1..20: note = Polynucleotide
  source 1..20: mol_type = other RNA
ggggcctgtcctgaattcac

SEQ ID NO: 620 - RNA, 21 nt, synthetic construct
  misc_feature 1..21: note = Polynucleotide
  source 1..21: mol_type = other RNA
tcagcgggcccaaactcagtt

SEQ ID NO: 621 - RNA, 21 nt, synthetic construct
  misc_feature 1..21: note = Polynucleotide
  source 1..21: mol_type = other RNA
ttgcagcgggcccaaactcat

SEQ ID NO: 622 - RNA, 21 nt, synthetic construct
  misc_feature 1..21: note = Polynucleotide
  source 1..21: mol_type = other RNA
tgagctgcagcgggcccaaat

SEQ ID NO: 623 - RNA, 21 nt, synthetic construct
  misc_feature 1..21: note = Polynucleotide
  source 1..21: mol_type = other RNA
tgacagggagctgcagcgggt

SEQ ID NO: 624 - RNA, 21 nt, synthetic construct
  misc_feature 1..21: note = Polynucleotide
  source 1..21: mol_type = other RNA
tgacccgccgggacagggagt

SEQ ID NO: 625 - RNA, 21 nt, synthetic construct
  misc_feature 1..21: note = Polynucleotide
  source 1..21: mol_type = other RNA
tcgccgtagcctgggacccgt

SEQ ID NO: 626 - RNA, 21 nt, synthetic construct
  misc_feature 1..21: note = Polynucleotide
  source 1..21: mol_type = other RNA
tcccgccgtagcctgggacct

SEQ ID NO: 627 - RNA, 21 nt, synthetic construct
  misc_feature 1..21: note = Polynucleotide
  source 1..21: mol_type = other RNA
tatccccgccgtagcctgggt

SEQ ID NO: 628 - RNA, 21 nt, synthetic construct
  misc_feature 1..21: note = Polynucleotide
  source 1..21: mol_type = other RNA
tcatccccgccgtagcctggt

SEQ ID NO: 629 - RNA, 21 nt, synthetic construct
  misc_feature 1..21: note = Polynucleotide
  source 1..21: mol_type = other RNA
ttaccgccatccccgccgtat

SEQ ID NO: 630 - RNA, 21 nt, synthetic construct
  misc_feature 1..21: note = Polynucleotide
  source 1..21: mol_type = other RNA
tttaccgccatccccgccgtt

SEQ ID NO: 631 - RNA, 21 nt, synthetic construct
  misc_feature 1..21: note = Polynucleotide
  source 1..21: mol_type = other RNA
tcagggttaccgccatcccct

SEQ ID NO: 632 - RNA, 21 nt, synthetic construct
  misc_feature 1..21: note = Polynucleotide
  source 1..21: mol_type = other RNA
tctgcagggttaccgccatct

SEQ ID NO: 633 - RNA, 21 nt, synthetic construct
  misc_feature 1..21: note = Polynucleotide
  source 1..21: mol_type = other RNA
taggctgcagggttaccgcct

SEQ ID NO: 634 - RNA, 21 nt, synthetic construct
  misc_feature 1..21: note = Polynucleotide
  source 1..21: mol_type = other RNA
tcaggctgcagggttaccgct

SEQ ID NO: 635 - RNA, 21 nt, synthetic construct
  misc_feature 1..21: note = Polynucleotide
  source 1..21: mol_type = other RNA
tcgcaggctgcagggttacct

SEQ ID NO: 636 - RNA, 21 nt, synthetic construct
  misc_feature 1..21: note = Polynucleotide
  source 1..21: mol_type = other RNA
tggttcgtgtcgccggcccgt

SEQ ID NO: 637 - RNA, 21 nt, synthetic construct
  misc_feature 1..21: note = Polynucleotide
  source 1..21: mol_type = other RNA
ttcactctgtctctgcggggt

SEQ ID NO: 638 - RNA, 21 nt, synthetic construct
  misc_feature 1..21: note = Polynucleotide
  source 1..21: mol_type = other RNA
tgggtcactctgtctctgcgt

SEQ ID NO: 639 - RNA, 21 nt, synthetic construct
  misc_feature 1..21: note = Polynucleotide
  source 1..21: mol_type = other RNA
tttgctgggtcactctgtctt

SEQ ID NO: 640 - RNA, 21 nt, synthetic construct
  misc_feature 1..21: note = Polynucleotide
  source 1..21: mol_type = other RNA
tcctcatgggctctgggttgt

SEQ ID NO: 641 - RNA, 21 nt, synthetic construct
  misc_feature 1..21: note = Polynucleotide
  source 1..21: mol_type = other RNA
tgggtgtccctcatgggctct

SEQ ID NO: 642 - RNA, 21 nt, synthetic construct
  misc_feature 1..21: note = Polynucleotide
  source 1..21: mol_type = other RNA
tagtgagggagcggggctgat

SEQ ID NO: 643 - RNA, 21 nt, synthetic construct
  misc_feature 1..21: note = Polynucleotide
  source 1..21: mol_type = other RNA
taagtgagggagcggggctgt

SEQ ID NO: 644 - RNA, 21 nt, synthetic construct
  misc_feature 1..21: note = Polynucleotide
  source 1..21: mol_type = other RNA
tcaagtgagggagcggggctt

SEQ ID NO: 645 - RNA, 21 nt, synthetic construct
  misc_feature 1..21: note = Polynucleotide
  source 1..21: mol_type = other RNA
tccaagtgagggagcggggct

SEQ ID NO: 646 - RNA, 21 nt, synthetic construct
  misc_feature 1..21: note = Polynucleotide
  source 1..21: mol_type = other RNA
tacccaagtgagggagcgggt

SEQ ID NO: 647 - RNA, 21 nt, synthetic construct
  misc_feature 1..21: note = Polynucleotide
  source 1..21: mol_type = other RNA
tagacccaagtgagggagcgt

SEQ ID NO: 648 - RNA, 21 nt, synthetic construct
  misc_feature 1..21: note = Polynucleotide
  source 1..21: mol_type = other RNA
taagacccaagtgagggagct

SEQ ID NO: 649 - RNA, 21 nt, synthetic construct
  misc_feature 1..21: note = Polynucleotide
  source 1..21: mol_type = other RNA
tggaagacccaagtgagggat

SEQ ID NO: 650 - RNA, 21 nt, synthetic construct
  misc_feature 1..21: note = Polynucleotide
  source 1..21: mol_type = other RNA
tgacaagggaagacccaagtt

SEQ ID NO: 651 - RNA, 21 nt, synthetic construct
  misc_feature 1..21: note = Polynucleotide
  source 1..21: mol_type = other RNA
tgaggacaagggaagacccat

SEQ ID NO: 652 - RNA, 21 nt, synthetic construct
  misc_feature 1..21: note = Polynucleotide
  source 1..21: mol_type = other RNA
tgcgagaggacaagggaagat

SEQ ID NO: 653 - RNA, 21 nt, synthetic construct
  misc_feature 1..21: note = Polynucleotide
  source 1..21: mol_type = other RNA
tcgcgagaggacaagggaagt

SEQ ID NO: 654 - RNA, 21 nt, synthetic construct
  misc_feature 1..21: note = Polynucleotide
  source 1..21: mol_type = other RNA
ttcgcgagaggacaagggaat

SEQ ID NO: 655 - RNA, 21 nt, synthetic construct
  misc_feature 1..21: note = Polynucleotide
  source 1..21: mol_type = other RNA
tctcgcgagaggacaagggat

SEQ ID NO: 656 - RNA, 21 nt, synthetic construct
  misc_feature 1..21: note = Polynucleotide
  source 1..21: mol_type = other RNA
tcaaggctctgcctcccctct

SEQ ID NO: 657 - RNA, 21 nt, synthetic construct
  misc_feature 1..21: note = Polynucleotide
  source 1..21: mol_type = other RNA
tacaaggctctgcctcccctt

SEQ ID NO: 658 - RNA, 21 nt, synthetic construct
  misc_feature 1..21: note = Polynucleotide
  source 1..21: mol_type = other RNA
tcaacaaggctctgcctccct

SEQ ID NO: 659 - RNA, 21 nt, synthetic construct
  misc_feature 1..21: note = Polynucleotide
  source 1..21: mol_type = other RNA
tccaacaaggctctgcctcct

SEQ ID NO: 660 - RNA, 21 nt, synthetic construct
  misc_feature 1..21: note = Polynucleotide
  source 1..21: mol_type = other RNA
tcccaacaaggctctgcctct

SEQ ID NO: 661 - RNA, 21 nt, synthetic construct
  misc_feature 1..21: note = Polynucleotide
  source 1..21: mol_type = other RNA
tccccaacaaggctctgcctt

SEQ ID NO: 662 - RNA, 21 nt, synthetic construct
  misc_feature 1..21: note = Polynucleotide
  source 1..21: mol_type = other RNA
tcaggccccaacaaggctctt

SEQ ID NO: 663 - RNA, 21 nt, synthetic construct
  misc_feature 1..21: note = Polynucleotide
  source 1..21: mol_type = other RNA
tacaggccccaacaaggctct

SEQ ID NO: 664 - RNA, 21 nt, synthetic construct
  misc_feature 1..21: note = Polynucleotide
  source 1..21: mol_type = other RNA
tgacaggccccaacaaggctt

SEQ ID NO: 665 - RNA, 21 nt, synthetic construct
  misc_feature 1..21: note = Polynucleotide
  source 1..21: mol_type = other RNA
taggacaggccccaacaaggt

SEQ ID NO: 666 - RNA, 21 nt, synthetic construct
  misc_feature 1..21: note = Polynucleotide
  source 1..21: mol_type = other RNA
tgaattcaggacaggccccat

SEQ ID NO: 667 - RNA, 21 nt, synthetic construct
  misc_feature 1..21: note = Polynucleotide
  source 1..21: mol_type = other RNA
ttgaattcaggacaggcccct

SEQ ID NO: 668 - RNA, 16 nt, synthetic construct
  misc_feature 1..16: note = Polynucleotide
  source 1..16: mol_type = other RNA
agtttgggcccgctga

SEQ ID NO: 669 - RNA, 16 nt, synthetic construct
  misc_feature 1..16: note = Polynucleotide
  source 1..16: mol_type = other RNA
tttgggcccgctgcaa

SEQ ID NO: 670 - RNA, 16 nt, synthetic construct
  misc_feature 1..16: note = Polynucleotide
  source 1..16: mol_type = other RNA
ggcccgctgcagctca

SEQ ID NO: 671 - RNA, 16 nt, synthetic construct
  misc_feature 1..16: note = Polynucleotide
  source 1..16: mol_type = other RNA
ctgcagctccctgtca

SEQ ID NO: 672 - RNA, 16 nt, synthetic construct
  misc_feature 1..16: note = Polynucleotide
  source 1..16: mol_type = other RNA
ctgtcccggcgggtca

SEQ ID NO: 673 - RNA, 16 nt, synthetic construct
  misc_feature 1..16: note = Polynucleotide
  source 1..16: mol_type = other RNA
tcccaggctacggcga

SEQ ID NO: 674 - RNA, 16 nt, synthetic construct
  misc_feature 1..16: note = Polynucleotide
  source 1..16: mol_type = other RNA
ccaggctacggcggga

SEQ ID NO: 675 - RNA, 16 nt, synthetic construct
  misc_feature 1..16: note = Polynucleotide
  source 1..16: mol_type = other RNA
ggctacggcggggata

SEQ ID NO: 676 - RNA, 16 nt, synthetic construct
  misc_feature 1..16: note = Polynucleotide
  source 1..16: mol_type = other RNA
gctacggcggggatga

SEQ ID NO: 677 - RNA, 16 nt, synthetic construct
  misc_feature 1..16: note = Polynucleotide
  source 1..16: mol_type = other RNA
gcggggatggcggtaa

SEQ ID NO: 678 - RNA, 16 nt, synthetic construct
  misc_feature 1..16: note = Polynucleotide
  source 1..16: mol_type = other RNA
cggggatggcggtaaa

SEQ ID NO: 679 - RNA, 16 nt, synthetic construct
  misc_feature 1..16: note = Polynucleotide
  source 1..16: mol_type = other RNA
atggcggtaaccctga

SEQ ID NO: 680 - RNA, 16 nt, synthetic construct
  misc_feature 1..16: note = Polynucleotide
  source 1..16: mol_type = other RNA
gcggtaaccctgcaga

SEQ ID NO: 681 - RNA, 16 nt, synthetic construct
  misc_feature 1..16: note = Polynucleotide
  source 1..16: mol_type = other RNA
gtaaccctgcagccta

SEQ ID NO: 682 - RNA, 16 nt, synthetic construct
  misc_feature 1..16: note = Polynucleotide
  source 1..16: mol_type = other RNA
taaccctgcagcctga

SEQ ID NO: 683 - RNA, 16 nt, synthetic construct
  misc_feature 1..16: note = Polynucleotide
  source 1..16: mol_type = other RNA
accctgcagcctgcga

SEQ ID NO: 684 - RNA, 16 nt, synthetic construct
  misc_feature 1..16: note = Polynucleotide
  source 1..16: mol_type = other RNA
ccggcgacacgaacca

SEQ ID NO: 685 - RNA, 16 nt, synthetic construct
  misc_feature 1..16: note = Polynucleotide
  source 1..16: mol_type = other RNA
gcagagacagagtgaa

SEQ ID NO: 686 - RNA, 16 nt, synthetic construct
  misc_feature 1..16: note = Polynucleotide
  source 1..16: mol_type = other RNA
gagacagagtgaccca

SEQ ID NO: 687 - RNA, 16 nt, synthetic construct
  misc_feature 1..16: note = Polynucleotide
  source 1..16: mol_type = other RNA
agagtgacccagcaaa

SEQ ID NO: 688 - RNA, 16 nt, synthetic construct
  misc_feature 1..16: note = Polynucleotide
  source 1..16: mol_type = other RNA
ccagagcccatgagga

SEQ ID NO: 689 - RNA, 16 nt, synthetic construct
  misc_feature 1..16: note = Polynucleotide
  source 1..16: mol_type = other RNA
ccatgagggacaccca

SEQ ID NO: 690 - RNA, 16 nt, synthetic construct
  misc_feature 1..16: note = Polynucleotide
  source 1..16: mol_type = other RNA
ccccgctccctcacta

SEQ ID NO: 691 - RNA, 16 nt, synthetic construct
  misc_feature 1..16: note = Polynucleotide
  source 1..16: mol_type = other RNA
cccgctccctcactta

SEQ ID NO: 692 - RNA, 16 nt, synthetic construct
  misc_feature 1..16: note = Polynucleotide
  source 1..16: mol_type = other RNA
ccgctccctcacttga

SEQ ID NO: 693 - RNA, 16 nt, synthetic construct
  misc_feature 1..16: note = Polynucleotide
  source 1..16: mol_type = other RNA
cgctccctcacttgga

SEQ ID NO: 694 - RNA, 16 nt, synthetic construct
  misc_feature 1..16: note = Polynucleotide
  source 1..16: mol_type = other RNA
ctccctcacttgggta

SEQ ID NO: 695 - RNA, 16 nt, synthetic construct
  misc_feature 1..16: note = Polynucleotide
  source 1..16: mol_type = other RNA
ccctcacttgggtcta

SEQ ID NO: 696 - RNA, 16 nt, synthetic construct
  misc_feature 1..16: note = Polynucleotide
  source 1..16: mol_type = other RNA
cctcacttgggtctta

SEQ ID NO: 697 - RNA, 16 nt, synthetic construct
  misc_feature 1..16: note = Polynucleotide
  source 1..16: mol_type = other RNA
tcacttgggtcttcca

SEQ ID NO: 698 - RNA, 16 nt, synthetic construct
  misc_feature 1..16: note = Polynucleotide
  source 1..16: mol_type = other RNA
gggtcttcccttgtca

SEQ ID NO: 699 - RNA, 16 nt, synthetic construct
  misc_feature 1..16: note = Polynucleotide
  source 1..16: mol_type = other RNA
tcttcccttgtcctca

SEQ ID NO: 700 - RNA, 16 nt, synthetic construct
  misc_feature 1..16: note = Polynucleotide
  source 1..16: mol_type = other RNA
cccttgtcctctcgca

SEQ ID NO: 701 - RNA, 16 nt, synthetic construct
  misc_feature 1..16: note = Polynucleotide
  source 1..16: mol_type = other RNA
ccttgtcctctcgcga

SEQ ID NO: 702 - RNA, 16 nt, synthetic construct
  misc_feature 1..16: note = Polynucleotide
  source 1..16: mol_type = other RNA
cttgtcctctcgcgaa

SEQ ID NO: 703 - RNA, 16 nt, synthetic construct
  misc_feature 1..16: note = Polynucleotide
  source 1..16: mol_type = other RNA
ttgtcctctcgcgaga

SEQ ID NO: 704 - RNA, 16 nt, synthetic construct
  misc_feature 1..16: note = Polynucleotide
  source 1..16: mol_type = other RNA
ggaggcagagccttga

SEQ ID NO: 705 - RNA, 16 nt, synthetic construct
  misc_feature 1..16: note = Polynucleotide
  source 1..16: mol_type = other RNA
gaggcagagccttgta

SEQ ID NO: 706 - RNA, 16 nt, synthetic construct
  misc_feature 1..16: note = Polynucleotide
  source 1..16: mol_type = other RNA
ggcagagccttgttga

SEQ ID NO: 707 - RNA, 16 nt, synthetic construct
  misc_feature 1..16: note = Polynucleotide
  source 1..16: mol_type = other RNA
gcagagccttgttgga

SEQ ID NO: 708 - RNA, 16 nt, synthetic construct
  misc_feature 1..16: note = Polynucleotide
  source 1..16: mol_type = other RNA
cagagccttgttggga

SEQ ID NO: 709 - RNA, 16 nt, synthetic construct
  misc_feature 1..16: note = Polynucleotide
  source 1..16: mol_type = other RNA
agagccttgttgggga

SEQ ID NO: 710 - RNA, 16 nt, synthetic construct
  misc_feature 1..16: note = Polynucleotide
  source 1..16: mol_type = other RNA
ccttgttggggcctga

SEQ ID NO: 711 - RNA, 16 nt, synthetic construct
  misc_feature 1..16: note = Polynucleotide
  source 1..16: mol_type = other RNA
cttgttggggcctgta

SEQ ID NO: 712 - RNA, 16 nt, synthetic construct
  misc_feature 1..16: note = Polynucleotide
  source 1..16: mol_type = other RNA
ttgttggggcctgtca

SEQ ID NO: 713 - RNA, 16 nt, synthetic construct
  misc_feature 1..16: note = Polynucleotide
  source 1..16: mol_type = other RNA
gttggggcctgtccta

SEQ ID NO: 714 - RNA, 16 nt, synthetic construct
  misc_feature 1..16: note = Polynucleotide
  source 1..16: mol_type = other RNA
gcctgtcctgaattca

SEQ ID NO: 715 - RNA, 16 nt, synthetic construct
  misc_feature 1..16: note = Polynucleotide
  source 1..16: mol_type = other RNA
cctgtcctgaattcaa

SEQ ID NO: 716 - RNA, 22 nt, synthetic construct
  misc_feature 1..22: note = Polynucleotide
  modified_base 1: mod_base = um
  modified_base 1..3: mod_base = OTHER; note = Phosphorothioate internucleotide linkage
  modified_base 2: mod_base = OTHER; note = 2-prime-fluorocytidine
  modified_base 3: mod_base = OTHER; note = 2-prime-O-methyladenosine
  modified_base 4: mod_base = OTHER; note = 2-prime-fluoroguanosine
  modified_base 5: mod_base = OTHER; note = 2-prime-fluorocytidine
  modified_base 6: mod_base = OTHER; note = 2-prime-fluoroguanosine
  modified_base 7: mod_base = gm
  modified_base 8: mod_base = OTHER; note = 2-prime-fluoroguanosine
  modified_base 9: mod_base = cm
  modified_base 10: mod_base = OTHER; note = 2-prime-fluorocytidine
  modified_base 11: mod_base = cm
  modified_base 12: mod_base = OTHER; note = 2-prime-fluoroadenosine
  modified_base 13: mod_base = OTHER; note = 2-prime-O-methyladenosine
  modified_base 14: mod_base = OTHER; note = 2-prime-fluoroadenosine
  modified_base 14..21: mod_base = OTHER; note = Phosphorothioate internucleotide linkage
  modified_base 15: mod_base = cm
  modified_base 16: mod_base = OTHER; note = 2-prime-fluorouridine
  modified_base 17: mod_base = cm
  modified_base 18: mod_base = OTHER; note = 2-prime-O-methyladenosine
  modified_base 19: mod_base = gm
  modified_base 20: mod_base = OTHER; note = 2-prime-fluorouridine
  modified_base 21: mod_base = um
  source 1..22: mol_type = other RNA
tcagcgggcccaaactcagttb

SEQ ID NO: 717 - RNA, 21 nt, synthetic construct
  misc_feature 1..21: note = Polynucleotide
  modified_base 1: mod_base = um
  modified_base 1..3: mod_base = OTHER; note = Phosphorothioate internucleotide linkage
  modified_base 2: mod_base = OTHER; note = 2-prime-fluorouridine
  modified_base 3: mod_base = gm
  modified_base 4: mod_base = OTHER; note = 2-prime-fluorocytidine
  modified_base 5: mod_base = OTHER; note = 2-prime-fluoroadenosine
  modified_base 6: mod_base = OTHER; note = 2-prime-fluoroguanosine
  modified_base 7: mod_base = cm
  modified_base 8: mod_base = OTHER; note = 2-prime-fluoroguanosine
  modified_base 9: mod_base = gm
  modified_base 10: mod_base = OTHER; note = 2-prime-fluoroguanosine
  modified_base 10: mod_base = OTHER; note = 2-prime-fluoroguanosine
  modified_base 11: mod_base = cm
  modified_base 12: mod_base = OTHER; note = 2-prime-fluorocytidine
  modified_base 13: mod_base = cm
  modified_base 14: mod_base = OTHER; note = 2-prime-fluoroadenosine
  modified_base 14..21: mod_base = OTHER; note = Phosphorothioate internucleotide linkage
  modified_base 15: mod_base = OTHER; note = 2-prime-O-methyladenosine
  modified_base 16: mod_base = OTHER; note = 2-prime-fluoroadenosine
  modified_base 17: mod_base = cm
  modified_base 18: mod_base = um
  modified_base 19: mod_base = cm
  modified_base 20: mod_base = OTHER; note = 2-prime-fluoroadenosine
  modified_base 21: mod_base = um
  source 1..21: mol_type = other RNA
ttgcagcgggcccaaactcat

SEQ ID NO: 718 - RNA, 21 nt, synthetic construct
  misc_feature 1..21: note = Polynucleotide
  modified_base 1: mod_base = um
  modified_base 1..3: mod_base = OTHER; note = Phosphorothioate internucleotide linkage
  modified_base 2: mod_base = OTHER; note = 2-prime-fluoroguanosine
  modified_base 3: mod_base = OTHER; note = 2-prime-O-methyladenosine
  modified_base 4: mod_base = OTHER; note = 2-prime-fluoroguanosine
  modified_base 5: mod_base = OTHER; note = 2-prime-fluorocytidine
  modified_base 6: mod_base = OTHER; note = 2-prime-fluorouridine
  modified_base 7: mod_base = gm
  modified_base 8: mod_base = OTHER; note = 2-prime-fluorocytidine
  modified_base 9: mod_base = OTHER; note = 2-prime-O-methyladenosine
  modified_base 10: mod_base = OTHER; note = 2-prime-fluoroguanosine
  modified_base 11: mod_base = cm
  modified_base 12: mod_base = OTHER; note = 2-prime-fluoroguanosine
  modified_base 13: mod_base = gm
  modified_base 14: mod_base = OTHER; note = 2-prime-fluoroguanosine
  modified_base 14..21: mod_base = OTHER; note = Phosphorothioate internucleotide linkage
  modified_base 15: mod_base = cm
  modified_base 16: mod_base = OTHER; note = 2-prime-fluorocytidine
  modified_base 17: mod_base = cm
  modified_base 18..19: mod_base = OTHER; note = 2-prime-O-methyladenosine
  modified_base 20: mod_base = OTHER; note = 2-prime-fluoroadenosine
  modified_base 21: mod_base = um
  source 1..21: mol_type = other RNA
tgagctgcagcgggcccaaat

SEQ ID NO: 719 - RNA, 21 nt, synthetic construct
  misc_feature 1..21: note = Polynucleotide
  modified_base 1: mod_base = um
  modified_base 1..3: mod_base = OTHER; note = Phosphorothioate internucleotide linkage
  modified_base 2: mod_base = OTHER; note = 2-prime-fluoroguanosine
  modified_base 3: mod_base = OTHER; note = 2-prime-O-methyladenosine
  modified_base 4: mod_base = OTHER; note = 2-prime-fluorocytidine
  modified_base 5: mod_base = OTHER; note = 2-prime-fluoroadenosine
  modified_base 6: mod_base = OTHER; note = 2-prime-fluoroguanosine
  modified_base 7: mod_base = gm
  modified_base 8: mod_base = OTHER; note = 2-prime-fluoroguanosine
  modified_base 9: mod_base = OTHER; note = 2-prime-O-methyladenosine
  modified_base 10: mod_base = OTHER; note = 2-prime-fluoroguanosine
  modified_base 11: mod_base = cm
  modified_base 12: mod_base = OTHER; note = 2-prime-fluorouridine
  modified_base 13: mod_base = gm
  modified_base 14: mod_base = OTHER; note = 2-prime-fluorocytidine
  modified_base 14..21: mod_base = OTHER; note = Phosphorothioate internucleotide linkage
  modified_base 15: mod_base = OTHER; note = 2-prime-O-methyladenosine
  modified_base 16: mod_base = OTHER; note = 2-prime-fluoroguanosine
  modified_base 17: mod_base = cm
  modified_base 18..19: mod_base = gm
  modified_base 20: mod_base = OTHER; note = 2-prime-fluoroguanosine
  modified_base 21: mod_base = um
  source 1..21: mol_type = other RNA
tgacagggagctgcagcgggt

SEQ ID NO: 720 - RNA, 21 nt, synthetic construct
  misc_feature 1..21: note = Polynucleotide
  modified_base 1: mod_base = um
  modified_base 1..3: mod_base = OTHER; note = Phosphorothioate internucleotide linkage
  modified_base 2: mod_base = OTHER; note = 2-prime-fluoroguanosine
  modified_base 3: mod_base = OTHER; note = 2-prime-O-methyladenosine
  modified_base 4..6: mod_base = OTHER; note = 2-prime-fluorocytidine
  modified_base 7: mod_base = gm
  modified_base 8: mod_base = OTHER; note = 2-prime-fluorocytidine
  modified_base 9: mod_base = cm
  modified_base 10: mod_base = OTHER; note = 2-prime-fluoroguanosine
  modified_base 11: mod_base = gm
  modified_base 12: mod_base = OTHER; note = 2-prime-fluoroguanosine
  modified_base 13: mod_base = OTHER; note = 2-prime-O-methyladenosine
  modified_base 14: mod_base = OTHER; note = 2-prime-fluorocytidine
  modified_base 14..21: mod_base = OTHER; note = Phosphorothioate internucleotide linkage
  modified_base 15: mod_base = OTHER; note = 2-prime-O-methyladenosine
  modified_base 16: mod_base = OTHER; note = 2-prime-fluoroguanosine
  modified_base 17..18: mod_base = gm
  modified_base 19: mod_base = OTHER; note = 2-prime-O-methyladenosine
  modified_base 20: mod_base = OTHER; note = 2-prime-fluoroguanosine
  modified_base 21: mod_base = um
  source 1..21: mol_type = other RNA
tgacccgccgggacagggagt

SEQ ID NO: 721 - RNA, 21 nt, synthetic construct
  misc_feature 1..21: note = Polynucleotide
  modified_base 1: mod_base = um
  modified_base 1..3: mod_base = OTHER; note = Phosphorothioate internucleotide linkage
  modified_base 2: mod_base = OTHER; note = 2-prime-fluorocytidine
  modified_base 3: mod_base = gm
  modified_base 4..5: mod_base = OTHER; note = 2-prime-fluorocytidine
  modified_base 6: mod_base = OTHER; note = 2-prime-fluoroguanosine
  modified_base 7: mod_base = um
  modified_base 8: mod_base = OTHER; note = 2-prime-fluoroadenosine
  modified_base 9: mod_base = gm
  modified_base 10: mod_base = OTHER; note = 2-prime-fluorocytidine
  modified_base 11: mod_base = cm
  modified_base 12: mod_base = OTHER; note = 2-prime-fluorouridine
  modified_base 13: mod_base = gm
  modified_base 14: mod_base = OTHER; note = 2-prime-fluoroguanosine
  modified_base 14..21: mod_base = OTHER; note = Phosphorothioate internucleotide linkage
  modified_base 15: mod_base = gm
  modified_base 16: mod_base = OTHER; note = 2-prime-fluoroadenosine
  modified_base 17..19: mod_base = cm
  modified_base 20: mod_base = OTHER; note = 2-prime-fluoroguanosine
  modified_base 21: mod_base = um
  source 1..21: mol_type = other RNA
tcgccgtagcctgggacccgt

SEQ ID NO: 722 - RNA, 21 nt, synthetic construct
  misc_feature 1..21: note = Polynucleotide
  modified_base 1: mod_base = um
  modified_base 1..3: mod_base = OTHER; note = Phosphorothioate internucleotide linkage
  modified_base 2: mod_base = OTHER; note = 2-prime-fluorocytidine
  modified_base 3: mod_base = cm
  modified_base 4: mod_base = OTHER; note = 2-prime-fluorocytidine
  modified_base 5: mod_base = OTHER; note = 2-prime-fluoroguanosine
  modified_base 6: mod_base = OTHER; note = 2-prime-fluorocytidine
  modified_base 7: mod_base = cm
  modified_base 8: mod_base = OTHER; note = 2-prime-fluoroguanosine
  modified_base 9: mod_base = um
  modified_base 10: mod_base = OTHER; note = 2-prime-fluoroadenosine
  modified_base 11: mod_base = gm
  modified_base 12: mod_base = OTHER; note = 2-prime-fluorocytidine
  modified_base 13: mod_base = cm
  modified_base 14: mod_base = OTHER; note = 2-prime-fluorouridine
  modified_base 14..21: mod_base = OTHER; note = Phosphorothioate internucleotide linkage
  modified_base 15: mod_base = gm
  modified_base 16: mod_base = OTHER; note = 2-prime-fluoroguanosine
  modified_base 17: mod_base = gm
  modified_base 18: mod_base = OTHER; note = 2-prime-O-methyladenosine
  modified_base 19: mod_base = cm
  modified_base 20: mod_base = OTHER; note = 2-prime-fluorocytidine
  modified_base 21: mod_base = um
  source 1..21: mol_type = other RNA
tcccgccgtagcctgggacct

SEQ ID NO: 723 - RNA, 21 nt, synthetic construct
  misc_feature 1..21: note = Polynucleotide
  modified_base 1: mod_base = um
  modified_base 1..3: mod_base = OTHER; note = Phosphorothioate internucleotide linkage
  modified_base 2: mod_base = OTHER; note = 2-prime-fluoroadenosine
  modified_base 3: mod_base = um
  modified_base 4..6: mod_base = OTHER; note = 2-prime-fluorocytidine
  modified_base 7: mod_base = cm
  modified_base 8: mod_base = OTHER; note = 2-prime-fluoroguanosine
  modified_base 9: mod_base = cm
  modified_base 10: mod_base = OTHER; note = 2-prime-fluorocytidine
  modified_base 11: mod_base = gm
  modified_base 12: mod_base = OTHER; note = 2-prime-fluorouridine
  modified_base 13: mod_base = OTHER; note = 2-prime-O-methyladenosine
  modified_base 14: mod_base = OTHER; note = 2-prime-fluoroguanosine
  modified_base 14..21: mod_base = OTHER; note = Phosphorothioate internucleotide linkage
  modified_base 15: mod_base = cm
  modified_base 16: mod_base = OTHER; note = 2-prime-fluorocytidine
  modified_base 17: mod_base = um
  modified_base 18..19: mod_base = gm
  modified_base 20: mod_base = OTHER; note = 2-prime-fluoroguanosine
  modified_base 21: mod_base = um
  source 1..21: mol_type = other RNA
tatccccgccgtagcctgggt

SEQ ID NO: 724 - RNA, 21 nt, synthetic construct
  misc_feature 1..21: note = Polynucleotide
  modified_base 1: mod_base = um
  modified_base 1..3: mod_base = OTHER; note = Phosphorothioate internucleotide linkage
  modified_base 2: mod_base = OTHER; note = 2-prime-fluorocytidine
  modified_base 3: mod_base = OTHER; note = 2-prime-O-methyladenosine
  modified_base 4: mod_base = OTHER; note = 2-prime-fluorouridine
  modified_base 5..6: mod_base = OTHER; note = 2-prime-fluorocytidine
  modified_base 7: mod_base = cm
  modified_base 8: mod_base = OTHER; note = 2-prime-fluorocytidine
  modified_base 9: mod_base = gm
  modified_base 10: mod_base = OTHER; note = 2-prime-fluorocytidine
  modified_base 11: mod_base = cm
  modified_base 12: mod_base = OTHER; note = 2-prime-fluoroguanosine
  modified_base 13: mod_base = um
  modified_base 14: mod_base = OTHER; note = 2-prime-fluoroadenosine
  modified_base 14..21: mod_base = OTHER; note = Phosphorothioate internucleotide linkage
  modified_base 15: mod_base = gm
  modified_base 16: mod_base = OTHER; note = 2-prime-fluorocytidine
  modified_base 17: mod_base = cm
  modified_base 18: mod_base = um
  modified_base 19: mod_base = gm
  modified_base 20: mod_base = OTHER; note = 2-prime-fluoroguanosine
  modified_base 21: mod_base = um
  source 1..21: mol_type = other RNA
tcatccccgccgtagcctggt

SEQ ID NO: 725 - RNA, 21 nt, synthetic construct
  misc_feature 1..21: note = Polynucleotide
  modified_base 1: mod_base = um
  modified_base 1..3: mod_base = OTHER; note = Phosphorothioate internucleotide linkage
  modified_base 2: mod_base = OTHER; note = 2-prime-fluorouridine
  modified_base 3: mod_base = OTHER; note = 2-prime-O-methyladenosine
  modified_base 4..5: mod_base = OTHER; note = 2-prime-fluorocytidine
  modified_base 6: mod_base = OTHER; note = 2-prime-fluoroguanosine
  modified_base 7: mod_base = cm
  modified_base 8: mod_base = OTHER; note = 2-prime-fluorocytidine
  modified_base 9: mod_base = OTHER; note = 2-prime-O-methyladenosine
  modified_base 10: mod_base = OTHER; note = 2-prime-fluorouridine
  modified_base 11: mod_base = cm
  modified_base 12: mod_base = OTHER; note = 2-prime-fluorocytidine
  modified_base 13: mod_base = cm
  modified_base 14: mod_base = OTHER; note = 2-prime-fluorocytidine
  modified_base 14..21: mod_base = OTHER; note = Phosphorothioate internucleotide linkage
  modified_base 15: mod_base = gm
  modified_base 16: mod_base = OTHER; note = 2-prime-fluorocytidine
  modified_base 17: mod_base = cm
  modified_base 18: mod_base = gm
  modified_base 19: mod_base = um
  modified_base 20: mod_base = OTHER; note = 2-prime-fluoroadenosine
  modified_base 21: mod_base = um
  source 1..21: mol_type = other RNA
ttaccgccatccccgccgtat

SEQ ID NO: 726 - RNA, 21 nt, synthetic construct
  misc_feature 1..21: note = Polynucleotide
  modified_base 1: mod_base = um
  modified_base 1..3: mod_base = OTHER; note = Phosphorothioate internucleotide linkage
  modified_base 2: mod_base = OTHER; note = 2-prime-fluorouridine
  modified_base 3: mod_base = um
  modified_base 4: mod_base = OTHER; note = 2-prime-fluoroadenosine
  modified_base 5..6: mod_base = OTHER; note = 2-prime-fluorocytidine
  modified_base 7: mod_base = gm
  modified_base 8: mod_base = OTHER; note = 2-prime-fluorocytidine
  modified_base 9: mod_base = cm
  modified_base 10: mod_base = OTHER; note = 2-prime-fluoroadenosine
  modified_base 11: mod_base = um
  modified_base 12: mod_base = OTHER; note = 2-prime-fluorocytidine
  modified_base 13: mod_base = cm
  modified_base 14: mod_base = OTHER; note = 2-prime-fluorocytidine
  modified_base 14..21: mod_base = OTHER; note = Phosphorothioate internucleotide linkage
  modified_base 15: mod_base = cm
  modified_base 16: mod_base = OTHER; note = 2-prime-fluoroguanosine
  modified_base 17..18: mod_base = cm
  modified_base 19: mod_base = gm
  modified_base 20: mod_base = OTHER; note = 2-prime-fluorouridine
  modified_base 21: mod_base = um
  source 1..21: mol_type = other RNA
tttaccgccatccccgccgtt

SEQ ID NO: 727 - RNA, 21 nt, synthetic construct
  misc_feature 1..21: note = Polynucleotide
  modified_base 1: mod_base = um
  modified_base 1..3: mod_base = OTHER; note = Phosphorothioate internucleotide linkage
  modified_base 2: mod_base = OTHER; note = 2-prime-fluorocytidine
  modified_base 3: mod_base = OTHER; note = 2-prime-O-methyladenosine
  modified_base 4..6: mod_base = OTHER; note = 2-prime-fluoroguanosine
  modified_base 7: mod_base = um
  modified_base 8: mod_base = OTHER; note = 2-prime-fluorouridine
  modified_base 9: mod_base = OTHER; note = 2-prime-O-methyladenosine
  modified_base 10: mod_base = OTHER; note = 2-prime-fluorocytidine
  modified_base 11: mod_base = cm
  modified_base 12: mod_base = OTHER; note = 2-prime-fluoroguanosine
  modified_base 13: mod_base = cm
  modified_base 14: mod_base = OTHER; note = 2-prime-fluorocytidine
  modified_base 14..21: mod_base = OTHER; note = Phosphorothioate internucleotide linkage
  modified_base 15: mod_base = OTHER; note = 2-prime-O-methyladenosine
  modified_base 16: mod_base = OTHER; note = 2-prime-fluorouridine
  modified_base 17..19: mod_base = cm
  modified_base 20: mod_base = OTHER; note = 2-prime-fluorocytidine
  modified_base 21: mod_base = um
  source 1..21: mol_type = other RNA
tcagggttaccgccatcccct

SEQ ID NO: 728 - RNA, 21 nt, synthetic construct
  misc_feature 1..21: note = Polynucleotide
  modified_base 1: mod_base = um
  modified_base 1..3: mod_base = OTHER; note = Phosphorothioate internucleotide linkage
  modified_base 2: mod_base = OTHER; note = 2-prime-fluorocytidine
  modified_base 3: mod_base = um
  modified_base 4: mod_base = OTHER; note = 2-prime-fluoroguanosine
  modified_base 5: mod_base = OTHER; note = 2-prime-fluorocytidine
  modified_base 6: mod_base = OTHER; note = 2-prime-fluoroadenosine
  modified_base 7: mod_base = gm
  modified_base 8: mod_base = OTHER; note = 2-prime-fluoroguanosine
  modified_base 9: mod_base = gm
  modified_base 10: mod_base = OTHER; note = 2-prime-fluorouridine
  modified_base 11: mod_base = um
  modified_base 12: mod_base = OTHER; note = 2-prime-fluoroadenosine
  modified_base 13: mod_base = cm
  modified_base 14: mod_base = OTHER; note = 2-prime-fluorocytidine
  modified_base 14..21: mod_base = OTHER; note = Phosphorothioate internucleotide linkage
  modified_base 15: mod_base = gm
  modified_base 16: mod_base = OTHER; note = 2-prime-fluorocytidine
  modified_base 17: mod_base = cm
  modified_base 18: mod_base = OTHER; note = 2-prime-O-methyladenosine
  modified_base 19: mod_base = um
  modified_base 20: mod_base = OTHER; note = 2-prime-fluorocytidine
  modified_base 21: mod_base = um
  source 1..21: mol_type = other RNA
tctgcagggttaccgccatct

SEQ ID NO: 729 - RNA, 21 nt, synthetic construct
  misc_feature 1..21: note = Polynucleotide
  modified_base 1: mod_base = um
  modified_base 1..3: mod_base = OTHER; note = Phosphorothioate internucleotide linkage
  modified_base 2: mod_base = OTHER; note = 2-prime-fluoroadenosine
  modified_base 3: mod_base = gm
  modified_base 4: mod_base = OTHER; note = 2-prime-fluoroguanosine
  modified_base 5: mod_base = OTHER; note = 2-prime-fluorocytidine
  modified_base 6: mod_base = OTHER; note = 2-prime-fluorouridine
  modified_base 7: mod_base = gm
  modified_base 8: mod_base = OTHER; note = 2-prime-fluorocytidine
  modified_base 9: mod_base = OTHER; note = 2-prime-O-methyladenosine
  modified_base 10: mod_base = OTHER; note = 2-prime-fluoroguanosine
  modified_base 11: mod_base = gm
  modified_base 12: mod_base = OTHER; note = 2-prime-fluoroguanosine
  modified_base 13: mod_base = um
  modified_base 14: mod_base = OTHER; note = 2-prime-fluorouridine
  modified_base 14..21: mod_base = OTHER; note = Phosphorothioate internucleotide linkage
  modified_base 15: mod_base = OTHER; note = 2-prime-O-methyladenosine
  modified_base 16: mod_base = OTHER; note = 2-prime-fluorocytidine
  modified_base 17: mod_base = cm
  modified_base 18: mod_base = gm
  modified_base 19: mod_base = cm
  modified_base 20: mod_base = OTHER; note = 2-prime-fluorocytidine
  modified_base 21: mod_base = um
  source 1..21: mol_type = other RNA
taggctgcagggttaccgcct

SEQ ID NO: 730 - RNA, 21 nt, synthetic construct
  misc_feature 1..21: note = Polynucleotide
  modified_base 1: mod_base = um
  modified_base 1..3: mod_base = OTHER; note = Phosphorothioate internucleotide linkage
  modified_base 2: mod_base = OTHER; note = 2-prime-fluorocytidine
  modified_base 3: mod_base = OTHER; note = 2-prime-O-methyladenosine
  modified_base 4..5: mod_base = OTHER; note = 2-prime-fluoroguanosine
  modified_base 6: mod_base = OTHER; note = 2-prime-fluorocytidine
  modified_base 7: mod_base = um
  modified_base 8: mod_base = OTHER; note = 2-prime-fluoroguanosine
  modified_base 9: mod_base = cm
  modified_base 10: mod_base = OTHER; note = 2-prime-fluoroadenosine
  modified_base 11: mod_base = gm
  modified_base 12: mod_base = OTHER; note = 2-prime-fluoroguanosine
  modified_base 13: mod_base = gm
  modified_base 14: mod_base = OTHER; note = 2-prime-fluorouridine
  modified_base 14..21: mod_base = OTHER; note = Phosphorothioate internucleotide linkage
  modified_base 15: mod_base = um
  modified_base 16: mod_base = OTHER; note = 2-prime-fluoroadenosine
  modified_base 17..18: mod_base = cm
  modified_base 19: mod_base = gm
  modified_base 20: mod_base = OTHER; note = 2-prime-fluorocytidine
  modified_base 21: mod_base = um
  source 1..21: mol_type = other RNA
tcaggctgcagggttaccgct

SEQ ID NO: 731 - RNA, 21 nt, synthetic construct
  misc_feature 1..21: note = Polynucleotide
  modified_base 1: mod_base = um
  modified_base 1..3: mod_base = OTHER; note = Phosphorothioate internucleotide linkage
  modified_base 2: mod_base = OTHER; note = 2-prime-fluorocytidine
  modified_base 3: mod_base = gm
  modified_base 4: mod_base = OTHER; note = 2-prime-fluorocytidine
  modified_base 5: mod_base = OTHER; note = 2-prime-fluoroadenosine
  modified_base 6: mod_base = OTHER; note = 2-prime-fluoroguanosine
  modified_base 7: mod_base = gm
  modified_base 8: mod_base = OTHER; note = 2-prime-fluorocytidine
  modified_base 9: mod_base = um
  modified_base 10: mod_base = OTHER; note = 2-prime-fluoroguanosine
  modified_base 11: mod_base = cm
  modified_base 12: mod_base = OTHER; note = 2-prime-fluoroadenosine
  modified_base 13: mod_base = gm
  modified_base 14: mod_base = OTHER; note = 2-prime-fluoroguanosine
  modified_base 14..21: mod_base = OTHER; note = Phosphorothioate internucleotide linkage
  modified_base 15: mod_base = gm
  modified_base 16: mod_base = OTHER; note = 2-prime-fluorouridine
  modified_base 17: mod_base = um
  modified_base 18: mod_base = OTHER; note = 2-prime-O-methyladenosine
  modified_base 19: mod_base = cm
  modified_base 20: mod_base = OTHER; note = 2-prime-fluorocytidine
  modified_base 21: mod_base = um
  source 1..21: mol_type = other RNA
tcgcaggctgcagggttacct

SEQ ID NO: 732 - RNA, 21 nt, synthetic construct
  misc_feature 1..21: note = Polynucleotide
  modified_base 1: mod_base = um
  modified_base 1..3: mod_base = OTHER; note = Phosphorothioate internucleotide linkage
  modified_base 2: mod_base = OTHER; note = 2-prime-fluoroguanosine
  modified_base 3: mod_base = gm
  modified_base 4..5: mod_base = OTHER; note = 2-prime-fluorouridine
  modified_base 6: mod_base = OTHER; note = 2-prime-fluorocytidine
  modified_base 7: mod_base = gm
  modified_base 8: mod_base = OTHER; note = 2-prime-fluorouridine
  modified_base 9: mod_base = gm
  modified_base 10: mod_base = OTHER; note = 2-prime-fluorouridine
  modified_base 11: mod_base = cm
  modified_base 12: mod_base = OTHER; note = 2-prime-fluoroguanosine
  modified_base 13: mod_base = cm
  modified_base 14: mod_base = OTHER; note = 2-prime-fluorocytidine
  modified_base 14..21: mod_base = OTHER; note = Phosphorothioate internucleotide linkage
  modified_base 15: mod_base = gm
  modified_base 16: mod_base = OTHER; note = 2-prime-fluoroguanosine
  modified_base 17..19: mod_base = cm
  modified_base 20: mod_base = OTHER; note = 2-prime-fluoroguanosine
  modified_base 21: mod_base = um
  source 1..21: mol_type = other RNA
tggttcgtgtcgccggcccgt

SEQ ID NO: 733 - RNA, 21 nt, synthetic construct
  misc_feature 1..21: note = Polynucleotide
  modified_base 1: mod_base = um
  modified_base 1..3: mod_base = OTHER; note = Phosphorothioate internucleotide linkage
  modified_base 2: mod_base = OTHER; note = 2-prime-fluorouridine
  modified_base 3: mod_base = cm
  modified_base 4: mod_base = OTHER; note = 2-prime-fluoroadenosine
  modified_base 5: mod_base = OTHER; note = 2-prime-fluorocytidine
  modified_base 6: mod_base = OTHER; note = 2-prime-fluorouridine
  modified_base 7: mod_base = cm
  modified_base 8: mod_base = OTHER; note = 2-prime-fluorouridine
  modified_base 9: mod_base = gm
  modified_base 10: mod_base = OTHER; note = 2-prime-fluorouridine
  modified_base 11: mod_base = cm
  modified_base 12: mod_base = OTHER; note = 2-prime-fluorouridine
  modified_base 13: mod_base = cm
  modified_base 14: mod_base = OTHER; note = 2-prime-fluorouridine
  modified_base 14..21: mod_base = OTHER; note = Phosphorothioate internucleotide linkage
  modified_base 15: mod_base = gm
  modified_base 16: mod_base = OTHER; note = 2-prime-fluorocytidine
  modified_base 17..19: mod_base = gm
  modified_base 20: mod_base = OTHER; note = 2-prime-fluoroguanosine
  modified_base 21: mod_base = um
  source 1..21: mol_type = other RNA
ttcactctgtctctgcggggt

SEQ ID NO: 734 - RNA, 21 nt, synthetic construct
  misc_feature 1..21: note = Polynucleotide
  modified_base 1: mod_base = um
  modified_base 1..3: mod_base = OTHER; note = Phosphorothioate internucleotide linkage
  modified_base 2: mod_base = OTHER; note = 2-prime-fluoroguanosine
  modified_base 3: mod_base = gm
  modified_base 4: mod_base = OTHER; note = 2-prime-fluoroguanosine
  modified_base 5: mod_base = OTHER; note = 2-prime-fluorouridine
  modified_base 6: mod_base = OTHER; note = 2-prime-fluorocytidine
  modified_base 7: mod_base = OTHER; note = 2-prime-O-methyladenosine
  modified_base 8: mod_base = OTHER; note = 2-prime-fluorocytidine
  modified_base 9: mod_base = um
  modified_base 10: mod_base = OTHER; note = 2-prime-fluorocytidine
  modified_base 11: mod_base = um
  modified_base 12: mod_base = OTHER; note = 2-prime-fluoroguanosine
  modified_base 13: mod_base = um
  modified_base 14: mod_base = OTHER; note = 2-prime-fluorocytidine
  modified_base 14..21: mod_base = OTHER; note = Phosphorothioate internucleotide linkage
  modified_base 15: mod_base = um
  modified_base 16: mod_base = OTHER; note = 2-prime-fluorocytidine
  modified_base 18: mod_base = gm
  modified_base 19: mod_base = cm
  modified_base 20: mod_base = OTHER; note = 2-prime-fluoroguanosine
  modified_base 21: mod_base = um
  source 1..21: mol_type = other RNA
tgggtcactctgtctctgcgt

SEQ ID NO: 735 - RNA, 21 nt, synthetic construct
  misc_feature 1..21: note = Polynucleotide
  modified_base 1: mod_base = um
  modified_base 1..3: mod_base = OTHER; note = Phosphorothioate internucleotide linkage
  modified_base 2: mod_base = OTHER; note = 2-prime-fluorouridine
  modified_base 3: mod_base = um
  modified_base 4: mod_base = OTHER; note = 2-prime-fluoroguanosine
  modified_base 5: mod_base = OTHER; note = 2-prime-fluorocytidine
  modified_base 6: mod_base = OTHER; note = 2-prime-fluorouridine
  modified_base 7: mod_base = gm
  modified_base 8: mod_base = OTHER; note = 2-prime-fluoroguanosine
  modified_base 9: mod_base = gm
  modified_base 10: mod_base = OTHER; note = 2-prime-fluorouridine
  modified_base 11: mod_base = cm
  modified_base 12: mod_base = OTHER; note = 2-prime-fluoroadenosine
  modified_base 13: mod_base = cm
  modified_base 14: mod_base = OTHER; note = 2-prime-fluorouridine
  modified_base 14..21: mod_base = OTHER; note = Phosphorothioate internucleotide linkage
  modified_base 15: mod_base = cm
  modified_base 16: mod_base = OTHER; note = 2-prime-fluorouridine
  modified_base 17: mod_base = gm
  modified_base 18: mod_base = um
  modified_base 19: mod_base = cm
  modified_base 20: mod_base = OTHER; note = 2-prime-fluorouridine
  modified_base 21: mod_base = um
  source 1..21: mol_type = other RNA
tttgctgggtcactctgtctt

SEQ ID NO: 736 - RNA, 21 nt, synthetic construct
  misc_feature 1..21: note = Polynucleotide
  modified_base 1: mod_base = um
  modified_base 1..3: mod_base = OTHER; note = Phosphorothioate internucleotide linkage
  modified_base 2: mod_base = OTHER; note = 2-prime-fluorocytidine
  modified_base 3: mod_base = cm
  modified_base 4: mod_base = OTHER; note = 2-prime-fluorouridine
  modified_base 5: mod_base = OTHER; note = 2-prime-fluorocytidine
  modified_base 6: mod_base = OTHER; note = 2-prime-fluoroadenosine
  modified_base 7: mod_base = um
  modified_base 8: mod_base = OTHER; note = 2-prime-fluoroguanosine
  modified_base 9..12: mod_base = gm
  modified_base 10: mod_base = OTHER; note = 2-prime-fluoroguanosine
  modified_base 11: mod_base = cm
  modified_base 12: mod_base = OTHER; note = 2-prime-fluorouridine
  modified_base 13: mod_base = cm
  modified_base 14: mod_base = OTHER; note = 2-prime-fluorouridine
  modified_base 14..21: mod_base = OTHER; note = Phosphorothioate internucleotide linkage
  modified_base 15: mod_base = gm
  modified_base 16: mod_base = OTHER; note = 2-prime-fluoroguanosine
  modified_base 17: mod_base = gm
  modified_base 18..19: mod_base = um
  modified_base 20: mod_base = OTHER; note = 2-prime-fluoroguanosine
  modified_base 21: mod_base = um
  source 1..21: mol_type = other RNA
tcctcatgggctctgggttgt

SEQ ID NO: 737 - RNA, 21 nt, synthetic construct
  misc_feature 1..21: note = Polynucleotide
  modified_base 1: mod_base = um
  modified_base 1..3: mod_base = OTHER; note = Phosphorothioate internucleotide linkage
  modified_base 2: mod_base = OTHER; note = 2-prime-fluoroguanosine
  modified_base 3: mod_base = gm
  modified_base 4: mod_base = OTHER; note = 2-prime-fluoroguanosine
  modified_base 5: mod_base = OTHER; note = 2-prime-fluorouridine
  modified_base 6: mod_base = OTHER; note = 2-prime-fluoroguanosine
  modified_base 7: mod_base = um
  modified_base 8: mod_base = OTHER; note = 2-prime-fluorocytidine
  modified_base 9: mod_base = cm
  modified_base 10: mod_base = OTHER; note = 2-prime-fluorocytidine
  modified_base 11: mod_base = um
  modified_base 12: mod_base = OTHER; note = 2-prime-fluorocytidine
  modified_base 13: mod_base = OTHER; note = 2-prime-O-methyladenosine
  modified_base 14: mod_base = OTHER; note = 2-prime-fluorouridine
  modified_base 14..21: mod_base = OTHER; note = Phosphorothioate internucleotide linkage
  modified_base 15: mod_base = gm
  modified_base 16: mod_base = OTHER; note = 2-prime-fluoroguanosine
  modified_base 17: mod_base = gm
  modified_base 18: mod_base = cm
  modified_base 19: mod_base = um
  modified_base 20: mod_base = OTHER; note = 2-prime-fluorocytidine
  modified_base 21: mod_base = um
  source 1..21: mol_type = other RNA
tgggtgtccctcatgggctct

SEQ ID NO: 738 - RNA, 21 nt, synthetic construct
  misc_feature 1..21: note = Polynucleotide
  modified_base 1: mod_base = um
  modified_base 1..3: mod_base = OTHER; note = Phosphorothioate internucleotide linkage
  modified_base 2: mod_base = OTHER; note = 2-prime-fluoroadenosine
  modified_base 3: mod_base = gm
  modified_base 4: mod_base = OTHER; note = 2-prime-fluorouridine
  modified_base 5: mod_base = OTHER; note = 2-prime-fluoroguanosine
  modified_base 6: mod_base = OTHER; note = 2-prime-fluoroadenosine
  modified_base 7: mod_base = gm
  modified_base 8: mod_base = OTHER; note = 2-prime-fluoroguanosine
  modified_base 9: mod_base = gm
  modified_base 10: mod_base = OTHER; note = 2-prime-fluoroadenosine
  modified_base 11: mod_base = gm
  modified_base 12: mod_base = OTHER; note = 2-prime-fluorocytidine
  modified_base 13: mod_base = gm
  modified_base 14: mod_base = OTHER; note = 2-prime-fluoroguanosine
  modified_base 14..21: mod_base = OTHER; note = Phosphorothioate internucleotide linkage
  modified_base 15: mod_base = gm
  modified_base 16: mod_base = OTHER; note = 2-prime-fluoroguanosine
  modified_base 17: mod_base = cm
  modified_base 18: mod_base = um
  modified_base 19: mod_base = gm
  modified_base 20: mod_base = OTHER; note = 2-prime-fluoroadenosine
  modified_base 21: mod_base = um
  source 1..21: mol_type = other RNA
tagtgagggagcggggctgat

SEQ ID NO: 739 - RNA, 21 nt, synthetic construct
  misc_feature 1..21: note = Polynucleotide
  modified_base 1: mod_base = um
  modified_base 1..3: mod_base = OTHER; note = Phosphorothioate internucleotide linkage
  modified_base 2: mod_base = OTHER; note = 2-prime-fluoroadenosine
  modified_base 3: mod_base = OTHER; note = 2-prime-O-methyladenosine
  modified_base 4: mod_base = OTHER; note = 2-prime-fluoroguanosine
  modified_base 5: mod_base = OTHER; note = 2-prime-fluorouridine
  modified_base 6: mod_base = OTHER; note = 2-prime-fluoroguanosine
  modified_base 7: mod_base = OTHER; note = 2-prime-O-methyladenosine
  modified_base 8: mod_base = OTHER; note = 2-prime-fluoroguanosine
  modified_base 9: mod_base = gm
  modified_base 10: mod_base = OTHER; note = 2-prime-fluoroguanosine
  modified_base 11: mod_base = OTHER; note = 2-prime-O-methyladenosine
  modified_base 12: mod_base = OTHER; note = 2-prime-fluoroguanosine
  modified_base 13: mod_base = cm
  modified_base 14: mod_base = OTHER; note = 2-prime-fluoroguanosine
  modified_base 14..21: mod_base = OTHER; note = Phosphorothioate internucleotide linkage
  modified_base 15: mod_base = gm
  modified_base 16: mod_base = OTHER; note = 2-prime-fluoroguanosine
  modified_base 17: mod_base = gm
  modified_base 18: mod_base = cm
  modified_base 19: mod_base = um
  modified_base 20: mod_base = OTHER; note = 2-prime-fluoroguanosine
  modified_base 21: mod_base = um
  source 1..21: mol_type = other RNA
taagtgagggagcggggctgt

SEQ ID NO: 740 - RNA, 21 nt, synthetic construct
  misc_feature 1..21: note = Polynucleotide
  modified_base 1: mod_base = um
  modified_base 1..3: mod_base = OTHER; note = Phosphorothioate internucleotide linkage
  modified_base 2: mod_base = OTHER; note = 2-prime-fluorocytidine
  modified_base 3: mod_base = OTHER; note = 2-prime-O-methyladenosine
  modified_base 4: mod_base = OTHER; note = 2-prime-fluoroadenosine
  modified_base 5: mod_base = OTHER; note = 2-prime-fluoroguanosine
  modified_base 6: mod_base = OTHER; note = 2-prime-fluorouridine
  modified_base 7: mod_base = gm
  modified_base 8: mod_base = OTHER; note = 2-prime-fluoroadenosine
  modified_base 9: mod_base = gm
  modified_base 10: mod_base = OTHER; note = 2-prime-fluoroguanosine
  modified_base 11: mod_base = gm
  modified_base 12: mod_base = OTHER; note = 2-prime-fluoroadenosine
  modified_base 13: mod_base = gm
  modified_base 14: mod_base = OTHER; note = 2-prime-fluorocytidine
  modified_base 14..21: mod_base = OTHER; note = Phosphorothioate internucleotide linkage
  modified_base 15: mod_base = gm
  modified_base 16: mod_base = OTHER; note = 2-prime-fluoroguanosine
  modified_base 17..18: mod_base = gm
  modified_base 19: mod_base = cm
  modified_base 20: mod_base = OTHER; note = 2-prime-fluorouridine
  modified_base 21: mod_base = um
  source 1..21: mol_type = other RNA
tcaagtgagggagcggggctt

SEQ ID NO: 741 - RNA, 21 nt, synthetic construct
  misc_feature 1..21: note = Polynucleotide
  modified_base 1: mod_base = um
  modified_base 1..3: mod_base = OTHER; note = Phosphorothioate internucleotide linkage
  modified_base 2: mod_base = OTHER; note = 2-prime-fluorocytidine
  modified_base 3: mod_base = cm
  modified_base 4..5: mod_base = OTHER; note = 2-prime-fluoroadenosine
  modified_base 6: mod_base = OTHER; note = 2-prime-fluoroguanosine
  modified_base 7: mod_base = um
  modified_base 8: mod_base = OTHER; note = 2-prime-fluoroguanosine
  modified_base 9: mod_base = OTHER; note = 2-prime-O-methyladenosine
  modified_base 10: mod_base = OTHER; note = 2-prime-fluoroguanosine
  modified_base 11: mod_base = gm
  modified_base 12: mod_base = OTHER; note = 2-prime-fluoroguanosine
  modified_base 13: mod_base = OTHER; note = 2-prime-O-methyladenosine
  modified_base 14: mod_base = OTHER; note = 2-prime-fluoroguanosine
  modified_base 14..21: mod_base = OTHER; note = Phosphorothioate internucleotide linkage
  modified_base 15: mod_base = cm
  modified_base 16: mod_base = OTHER; note = 2-prime-fluoroguanosine
  modified_base 17..19: mod_base = gm
  modified_base 20: mod_base = OTHER; note = 2-prime-fluorocytidine
  modified_base 21: mod_base = um
  source 1..21: mol_type = other RNA
tccaagtgagggagcggggct

SEQ ID NO: 742 - RNA, 21 nt, synthetic construct
  misc_feature 1..21: note = Polynucleotide
  modified_base 1: mod_base = um
  modified_base 1..3: mod_base = OTHER; note = Phosphorothioate internucleotide linkage
  modified_base 2: mod_base = OTHER; note = 2-prime-fluoroadenosine
  modified_base 3: mod_base = cm
  modified_base 4..5: mod_base = OTHER; note = 2-prime-fluorocytidine
  modified_base 6: mod_base = OTHER; note = 2-prime-fluoroadenosine
  modified_base 7: mod_base = OTHER; note = 2-prime-O-methyladenosine
  modified_base 8: mod_base = OTHER; note = 2-prime-fluoroguanosine
  modified_base 9: mod_base = um
  modified_base 10: mod_base = OTHER; note = 2-prime-fluoroguanosine
  modified_base 11: mod_base = OTHER; note = 2-prime-O-methyladenosine
  modified_base 12: mod_base = OTHER; note = 2-prime-fluoroguanosine
  modified_base 13: mod_base = gm
  modified_base 14: mod_base = OTHER; note = 2-prime-fluoroguanosine
  modified_base 14..21: mod_base = OTHER; note = Phosphorothioate internucleotide linkage
  modified_base 15: mod_base = OTHER; note = 2-prime-O-methyladenosine
  modified_base 16: mod_base = OTHER; note = 2-prime-fluoroguanosine
  modified_base 17: mod_base = cm
  modified_base 18..19: mod_base = gm
  modified_base 20: mod_base = OTHER; note = 2-prime-fluoroguanosine
  modified_base 21: mod_base = um
  source 1..21: mol_type = other RNA
tacccaagtgagggagcgggt

SEQ ID NO: 743 - RNA, 21 nt, synthetic construct
  misc_feature 1..21: note = Polynucleotide
  modified_base 1: mod_base = um
  modified_base 1..3: mod_base = OTHER; note = Phosphorothioate internucleotide linkage
  modified_base 2: mod_base = OTHER; note = 2-prime-fluoroadenosine
  modified_base 3: mod_base = gm
  modified_base 4: mod_base = OTHER; note = 2-prime-fluoroadenosine
  modified_base 5..6: mod_base = OTHER; note = 2-prime-fluorocytidine
  modified_base 7: mod_base = cm
  modified_base 8: mod_base = OTHER; note = 2-prime-fluoroadenosine
  modified_base 9: mod_base = OTHER; note = 2-prime-O-methyladenosine
  modified_base 10: mod_base = OTHER; note = 2-prime-fluoroguanosine
  modified_base 11: mod_base = um
  modified_base 12: mod_base = OTHER; note = 2-prime-fluoroguanosine
  modified_base 13: mod_base = OTHER; note = 2-prime-O-methyladenosine
  modified_base 14: mod_base = OTHER; note = 2-prime-fluoroguanosine
  modified_base 14..21: mod_base = OTHER; note = Phosphorothioate internucleotide linkage
  modified_base 15: mod_base = gm
  modified_base 16: mod_base = OTHER; note = 2-prime-fluoroguanosine
  modified_base 17: mod_base = OTHER; note = 2-prime-O-methyladenosine
  modified_base 18: mod_base = gm
  modified_base 19: mod_base = cm
  modified_base 20: mod_base = OTHER; note = 2-prime-fluoroguanosine
  modified_base 21: mod_base = um
  source 1..21: mol_type = other RNA
tagacccaagtgagggagcgt

SEQ ID NO: 744 - RNA, 21 nt, synthetic construct
  misc_feature 1..21: note = Polynucleotide
  modified_base 1: mod_base = um
  modified_base 1..3: mod_base = OTHER; note = Phosphorothioate internucleotide linkage
  modified_base 2: mod_base = OTHER; note = 2-prime-fluoroadenosine
  modified_base 3: mod_base = OTHER; note = 2-prime-O-methyladenosine
  modified_base 4: mod_base = OTHER; note = 2-prime-fluoroguanosine
  modified_base 5: mod_base = OTHER; note = 2-prime-fluoroadenosine
  modified_base 6: mod_base = OTHER; note = 2-prime-fluorocytidine
  modified_base 7: mod_base = cm
  modified_base 8: mod_base = OTHER; note = 2-prime-fluorocytidine
  modified_base 9: mod_base = OTHER; note = 2-prime-O-methyladenosine
  modified_base 10: mod_base = OTHER; note = 2-prime-fluoroadenosine
  modified_base 11: mod_base = gm
  modified_base 12: mod_base = OTHER; note = 2-prime-fluorouridine
  modified_base 13: mod_base = gm
  modified_base 14: mod_base = OTHER; note = 2-prime-fluoroadenosine
  modified_base 14..21: mod_base = OTHER; note = Phosphorothioate internucleotide linkage
  modified_base 15: mod_base = gm
  modified_base 16: mod_base = OTHER; note = 2-prime-fluoroguanosine
  modified_base 17: mod_base = gm
  modified_base 18: mod_base = OTHER; note = 2-prime-O-methyladenosine
  modified_base 19: mod_base = gm
  modified_base 20: mod_base = OTHER; note = 2-prime-fluorocytidine
  modified_base 21: mod_base = um
  source 1..21: mol_type = other RNA
taagacccaagtgagggagct

SEQ ID NO: 745 - RNA, 21 nt, synthetic construct
  misc_feature 1..21: note = Polynucleotide
  modified_base 1: mod_base = um
  modified_base 1..3: mod_base = OTHER; note = Phosphorothioate internucleotide linkage
  modified_base 2: mod_base = OTHER; note = 2-prime-fluoroguanosine
  modified_base 3: mod_base = gm
  modified_base 4..5: mod_base = OTHER; note = 2-prime-fluoroadenosine
  modified_base 6: mod_base = OTHER; note = 2-prime-fluoroguanosine
  modified_base 7: mod_base = OTHER; note = 2-prime-O-methyladenosine
  modified_base 8: mod_base = OTHER; note = 2-prime-fluorocytidine
  modified_base 9: mod_base = cm
  modified_base 10: mod_base = OTHER; note = 2-prime-fluorocytidine
  modified_base 11: mod_base = OTHER; note = 2-prime-O-methyladenosine
  modified_base 12: mod_base = OTHER; note = 2-prime-fluoroadenosine
  modified_base 13: mod_base = gm
  modified_base 14: mod_base = OTHER; note = 2-prime-fluorouridine
  modified_base 14..21: mod_base = OTHER; note = Phosphorothioate internucleotide linkage
  modified_base 15: mod_base = gm
  modified_base 16: mod_base = OTHER; note = 2-prime-fluoroadenosine
  modified_base 17..19: mod_base = gm
  modified_base 20: mod_base = OTHER; note = 2-prime-fluoroadenosine
  modified_base 21: mod_base = um
  source 1..21: mol_type = other RNA
tggaagacccaagtgagggat

SEQ ID NO: 746 - RNA, 21 nt, synthetic construct
  misc_feature 1..21: note = Polynucleotide
  modified_base 1: mod_base = um
  modified_base 1..3: mod_base = OTHER; note = Phosphorothioate internucleotide linkage
  modified_base 2: mod_base = OTHER; note = 2-prime-fluoroguanosine
  modified_base 3: mod_base = OTHER; note = 2-prime-O-methyladenosine
  modified_base 4: mod_base = OTHER; note = 2-prime-fluorocytidine
  modified_base 5..6: mod_base = OTHER; note = 2-prime-fluoroadenosine
  modified_base 7: mod_base = gm
  modified_base 8: mod_base = OTHER; note = 2-prime-fluoroguanosine
  modified_base 9: mod_base = gm
  modified_base 10: mod_base = OTHER; note = 2-prime-fluoroadenosine
  modified_base 11: mod_base = OTHER; note = 2-prime-O-methyladenosine
  modified_base 12: mod_base = OTHER; note = 2-prime-fluoroguanosine
  modified_base 13: mod_base = OTHER; note = 2-prime-O-methyladenosine
  modified_base 14: mod_base = OTHER; note = 2-prime-fluorocytidine
  modified_base 14..21: mod_base = OTHER; note = Phosphorothioate internucleotide linkage
  modified_base 15: mod_base = cm
  modified_base 16: mod_base = OTHER; note = 2-prime-fluorocytidine
  modified_base 17..18: mod_base = OTHER; note = 2-prime-O-methyladenosine
  modified_base 19: mod_base = gm
  modified_base 20: mod_base = OTHER; note = 2-prime-fluorouridine
  modified_base 21: mod_base = um
  source 1..21: mol_type = other RNA
tgacaagggaagacccaagtt

SEQ ID NO: 747 - RNA, 21 nt, synthetic construct
  misc_feature 1..21: note = Polynucleotide
  modified_base 1: mod_base = um
  modified_base 1..3: mod_base = OTHER; note = Phosphorothioate internucleotide linkage
  modified_base 2: mod_base = OTHER; note = 2-prime-fluoroguanosine
  modified_base 3: mod_base = OTHER; note = 2-prime-O-methyladenosine
  modified_base 4..5: mod_base = OTHER; note = 2-prime-fluoroguanosine
  modified_base 6: mod_base = OTHER; note = 2-prime-fluoroadenosine
  modified_base 7: mod_base = cm
  modified_base 8: mod_base = OTHER; note = 2-prime-fluoroadenosine
  modified_base 9: mod_base = OTHER; note = 2-prime-O-methyladenosine
  modified_base 10: mod_base = OTHER; note = 2-prime-fluoroguanosine
  modified_base 11: mod_base = gm
  modified_base 12: mod_base = OTHER; note = 2-prime-fluoroguanosine
  modified_base 13: mod_base = OTHER; note = 2-prime-O-methyladenosine
  modified_base 14: mod_base = OTHER; note = 2-prime-fluoroadenosine
  modified_base 14..21: mod_base = OTHER; note = Phosphorothioate internucleotide linkage
  modified_base 15: mod_base = gm
  modified_base 16: mod_base = OTHER; note = 2-prime-fluoroadenosine
  modified_base 17..19: mod_base = cm
  modified_base 20: mod_base = OTHER; note = 2-prime-fluoroadenosine
  modified_base 21: mod_base = um
  source 1..21: mol_type = other RNA
tgaggacaagggaagacccat

SEQ ID NO: 748 - RNA, 21 nt, synthetic construct
  misc_feature 1..21: note = Polynucleotide
  modified_base 1: mod_base = um
  modified_base 1..3: mod_base = OTHER; note = Phosphorothioate internucleotide linkage
  modified_base 2: mod_base = OTHER; note = 2-prime-fluoroguanosine
  modified_base 3: mod_base = cm
  modified_base 4: mod_base = OTHER; note = 2-prime-fluoroguanosine
  modified_base 5: mod_base = OTHER; note = 2-prime-fluoroadenosine
  modified_base 6: mod_base = OTHER; note = 2-prime-fluoroguanosine
  modified_base 7: mod_base = OTHER; note = 2-prime-O-methyladenosine
  modified_base 8: mod_base = OTHER; note = 2-prime-fluoroguanosine
  modified_base 9: mod_base = gm
  modified_base 10: mod_base = OTHER; note = 2-prime-fluoroadenosine
  modified_base 11: mod_base = cm
  modified_base 12: mod_base = OTHER; note = 2-prime-fluoroadenosine
  modified_base 13: mod_base = OTHER; note = 2-prime-O-methyladenosine
  modified_base 14: mod_base = OTHER; note = 2-prime-fluoroguanosine
  modified_base 14..21: mod_base = OTHER; note = Phosphorothioate internucleotide linkage
  modified_base 15: mod_base = gm
  modified_base 16: mod_base = OTHER; note = 2-prime-fluoroguanosine
  modified_base 17..18: mod_base = OTHER; note = 2-prime-O-methyladenosine
  modified_base 19: mod_base = gm
  modified_base 20: mod_base = OTHER; note = 2-prime-fluoroadenosine
  modified_base 21: mod_base = um
  source 1..21: mol_type = other RNA
tgcgagaggacaagggaagat

SEQ ID NO: 749 - RNA, 21 nt, synthetic construct
  misc_feature 1..21: note = Polynucleotide
  modified_base 1: mod_base = um
  modified_base 1..3: mod_base = OTHER; note = Phosphorothioate internucleotide linkage
  modified_base 2: mod_base = OTHER; note = 2-prime-fluorocytidine
  modified_base 3: mod_base = gm
  modified_base 4: mod_base = OTHER; note = 2-prime-fluorocytidine
  modified_base 5: mod_base = OTHER; note = 2-prime-fluoroguanosine
  modified_base 6: mod_base = OTHER; note = 2-prime-fluoroadenosine
  modified_base 7: mod_base = gm
  modified_base 8: mod_base = OTHER; note = 2-prime-fluoroadenosine
  modified_base 9: mod_base = gm
  modified_base 10: mod_base = OTHER; note = 2-prime-fluoroguanosine
  modified_base 11: mod_base = OTHER; note = 2-prime-O-methyladenosine
  modified_base 12: mod_base = OTHER; note = 2-prime-fluorocytidine
  modified_base 13: mod_base = OTHER; note = 2-prime-O-methyladenosine
  modified_base 14: mod_base = OTHER; note = 2-prime-fluoroadenosine
  modified_base 14..21: mod_base = OTHER; note = Phosphorothioate internucleotide linkage
  modified_base 15: mod_base = gm
  modified_base 16: mod_base = OTHER; note = 2-prime-fluoroguanosine
  modified_base 17: mod_base = gm
  modified_base 18..19: mod_base = OTHER; note = 2-prime-O-methyladenosine
  modified_base 20: mod_base = OTHER; note = 2-prime-fluoroguanosine
  modified_base 21: mod_base = um
  source 1..21: mol_type = other RNA
tcgcgagaggacaagggaagt

SEQ ID NO: 750 - RNA, 21 nt, synthetic construct
  misc_feature 1..21: note = Polynucleotide
  modified_base 1: mod_base = um
  modified_base 1..3: mod_base = OTHER; note = Phosphorothioate internucleotide linkage
  modified_base 2: mod_base = OTHER; note = 2-prime-fluorouridine
  modified_base 3: mod_base = cm
  modified_base 4: mod_base = OTHER; note = 2-prime-fluoroguanosine
  modified_base 5: mod_base = OTHER; note = 2-prime-fluorocytidine
  modified_base 6: mod_base = OTHER; note = 2-prime-fluoroguanosine
  modified_base 7: mod_base = OTHER; note = 2-prime-O-methyladenosine
  modified_base 8: mod_base = OTHER; note = 2-prime-fluoroguanosine
  modified_base 9: mod_base = OTHER; note = 2-prime-O-methyladenosine
  modified_base 10: mod_base = OTHER; note = 2-prime-fluoroguanosine
  modified_base 11: mod_base = gm
  modified_base 12: mod_base = OTHER; note = 2-prime-fluoroadenosine
  modified_base 13: mod_base = cm
  modified_base 14: mod_base = OTHER; note = 2-prime-fluoroadenosine
  modified_base 14..21: mod_base = OTHER; note = Phosphorothioate internucleotide linkage
  modified_base 15: mod_base = OTHER; note = 2-prime-O-methyladenosine
  modified_base 16: mod_base = OTHER; note = 2-prime-fluoroguanosine
  modified_base 17..18: mod_base = gm
  modified_base 19: mod_base = OTHER; note = 2-prime-O-methyladenosine
  modified_base 20: mod_base = OTHER; note = 2-prime-fluoroadenosine
  modified_base 21: mod_base = um
  source 1..21: mol_type = other RNA
ttcgcgagaggacaagggaat

SEQ ID NO: 751 - RNA, 21 nt, synthetic construct
  misc_feature 1..21: note = Polynucleotide
  modified_base 1: mod_base = um
  modified_base 1..3: mod_base = OTHER; note = Phosphorothioate internucleotide linkage
  modified_base 2: mod_base = OTHER; note = 2-prime-fluorocytidine
  modified_base 3: mod_base = um
  modified_base 4: mod_base = OTHER; note = 2-prime-fluorocytidine
  modified_base 5: mod_base = OTHER; note = 2-prime-fluoroguanosine
  modified_base 6: mod_base = OTHER; note = 2-prime-fluorocytidine
  modified_base 7: mod_base = gm
  modified_base 8: mod_base = OTHER; note = 2-prime-fluoroadenosine
  modified_base 9: mod_base = gm
  modified_base 10: mod_base = OTHER; note = 2-prime-fluoroadenosine
  modified_base 11: mod_base = gm
  modified_base 12: mod_base = OTHER; note = 2-prime-fluoroguanosine
  modified_base 13: mod_base = OTHER; note = 2-prime-O-methyladenosine
  modified_base 14: mod_base = OTHER; note = 2-prime-fluorocytidine
  modified_base 14..21: mod_base = OTHER; note = Phosphorothioate internucleotide linkage
  modified_base 15: mod_base = OTHER; note = 2-prime-O-methyladenosine
  modified_base 16: mod_base = OTHER; note = 2-prime-fluoroadenosine
  modified_base 17..19: mod_base = gm
  modified_base 20: mod_base = OTHER; note = 2-prime-fluoroadenosine
  modified_base 21: mod_base = um
  source 1..21: mol_type = other RNA
tctcgcgagaggacaagggat

SEQ ID NO: 752 - RNA, 21 nt, synthetic construct
  misc_feature 1..21: note = Polynucleotide
  modified_base 1: mod_base = um
  modified_base 1..3: mod_base = OTHER; note = Phosphorothioate internucleotide linkage
  modified_base 2: mod_base = OTHER; note = 2-prime-fluorocytidine
  modified_base 3: mod_base = OTHER; note = 2-prime-O-methyladenosine
  modified_base 4: mod_base = OTHER; note = 2-prime-fluoroadenosine
  modified_base 5..6: mod_base = OTHER; note = 2-prime-fluoroguanosine
  modified_base 7: mod_base = cm
  modified_base 8: mod_base = OTHER; note = 2-prime-fluorouridine
  modified_base 9: mod_base = cm
  modified_base 10: mod_base = OTHER; note = 2-prime-fluorouridine
  modified_base 11: mod_base = gm
  modified_base 12: mod_base = OTHER; note = 2-prime-fluorocytidine
  modified_base 13: mod_base = cm
  modified_base 14: mod_base = OTHER; note = 2-prime-fluorouridine
  modified_base 14..21: mod_base = OTHER; note = Phosphorothioate internucleotide linkage
  modified_base 15: mod_base = cm
  modified_base 16: mod_base = OTHER; note = 2-prime-fluorocytidine
  modified_base 17..18: mod_base = cm
  modified_base 19: mod_base = um
  modified_base 20: mod_base = OTHER; note = 2-prime-fluorocytidine
  modified_base 21: mod_base = um
  source 1..21: mol_type = other RNA
tcaaggctctgcctcccctct

SEQ ID NO: 753 - RNA, 21 nt, synthetic construct
  misc_feature 1..21: note = Polynucleotide
  modified_base 1: mod_base = um
  modified_base 1..3: mod_base = OTHER; note = Phosphorothioate internucleotide linkage
  modified_base 2: mod_base = OTHER; note = 2-prime-fluoroadenosine
  modified_base 3: mod_base = cm
  modified_base 4..5: mod_base = OTHER; note = 2-prime-fluoroadenosine
  modified_base 6: mod_base = OTHER; note = 2-prime-fluoroguanosine
  modified_base 7: mod_base = gm
  modified_base 8: mod_base = OTHER; note = 2-prime-fluorocytidine
  modified_base 9: mod_base = um
  modified_base 10: mod_base = OTHER; note = 2-prime-fluorocytidine
  modified_base 11: mod_base = um
  modified_base 12: mod_base = OTHER; note = 2-prime-fluoroguanosine
  modified_base 13: mod_base = cm
  modified_base 14: mod_base = OTHER; note = 2-prime-fluorocytidine
  modified_base 14..21: mod_base = OTHER; note = Phosphorothioate internucleotide linkage
  modified_base 15: mod_base = um
  modified_base 16: mod_base = OTHER; note = 2-prime-fluorocytidine
  modified_base 17..19: mod_base = cm
  modified_base 20: mod_base = OTHER; note = 2-prime-fluorouridine
  modified_base 21: mod_base = um
  source 1..21: mol_type = other RNA
tacaaggctctgcctcccctt

SEQ ID NO: 754 - RNA, 21 nt, synthetic construct
  misc_feature 1..21: note = Polynucleotide
  modified_base 1: mod_base = um
  modified_base 1..3: mod_base = OTHER; note = Phosphorothioate internucleotide linkage
  modified_base 2: mod_base = OTHER; note = 2-prime-fluorocytidine
  modified_base 3: mod_base = OTHER; note = 2-prime-O-methyladenosine
  modified_base 4: mod_base = OTHER; note = 2-prime-fluoroadenosine
  modified_base 5: mod_base = OTHER; note = 2-prime-fluorocytidine
  modified_base 6: mod_base = OTHER; note = 2-prime-fluoroadenosine
  modified_base 7: mod_base = OTHER; note = 2-prime-O-methyladenosine
  modified_base 8: mod_base = OTHER; note = 2-prime-fluoroguanosine
  modified_base 9: mod_base = gm
  modified_base 10: mod_base = OTHER; note = 2-prime-fluorocytidine
  modified_base 11: mod_base = um
  modified_base 12: mod_base = OTHER; note = 2-prime-fluorocytidine
  modified_base 13: mod_base = um
  modified_base 14: mod_base = OTHER; note = 2-prime-fluoroguanosine
  modified_base 14..21: mod_base = OTHER; note = Phosphorothioate internucleotide linkage
  modified_base 15: mod_base = cm
  modified_base 16: mod_base = OTHER; note = 2-prime-fluorocytidine
  modified_base 17: mod_base = um
  modified_base 18..19: mod_base = cm
  modified_base 20: mod_base = OTHER; note = 2-prime-fluorocytidine
  modified_base 21: mod_base = um
  source 1..21: mol_type = other RNA
tcaacaaggctctgcctccct

SEQ ID NO: 755 - RNA, 21 nt, synthetic construct
  misc_feature 1..21: note = Polynucleotide
  modified_base 1: mod_base = um
  modified_base 1..3: mod_base = OTHER; note = Phosphorothioate internucleotide linkage
  modified_base 2: mod_base = OTHER; note = 2-prime-fluorocytidine
  modified_base 3: mod_base = cm
  modified_base 4..5: mod_base = OTHER; note = 2-prime-fluoroadenosine
  modified_base 6: mod_base = OTHER; note = 2-prime-fluorocytidine
  modified_base 7: mod_base = OTHER; note = 2-prime-O-methyladenosine
  modified_base 8: mod_base = OTHER; note = 2-prime-fluoroadenosine
  modified_base 9: mod_base = gm
  modified_base 10: mod_base = OTHER; note = 2-prime-fluoroguanosine
  modified_base 11: mod_base = cm
  modified_base 12: mod_base = OTHER; note = 2-prime-fluorouridine
  modified_base 13: mod_base = cm
  modified_base 14: mod_base = OTHER; note = 2-prime-fluorouridine
  modified_base 14..21: mod_base = OTHER; note = Phosphorothioate internucleotide linkage
  modified_base 15: mod_base = gm
  modified_base 16: mod_base = OTHER; note = 2-prime-fluorocytidine
  modified_base 17: mod_base = cm
  modified_base 18: mod_base = um
  modified_base 19: mod_base = cm
  modified_base 20: mod_base = OTHER; note = 2-prime-fluorocytidine
  modified_base 21: mod_base = um
  source 1..21: mol_type = other RNA
tccaacaaggctctgcctcct

SEQ ID NO: 756 - RNA, 21 nt, synthetic construct
  misc_feature 1..21: note = Polynucleotide
  modified_base 1: mod_base = um
  modified_base 1..3: mod_base = OTHER; note = Phosphorothioate internucleotide linkage
  modified_base 2: mod_base = OTHER; note = 2-prime-fluorocytidine
  modified_base 3: mod_base = cm
  modified_base 4: mod_base = OTHER; note = 2-prime-fluorocytidine
  modified_base 5..6: mod_base = OTHER; note = 2-prime-fluoroadenosine
  modified_base 7: mod_base = cm
  modified_base 8: mod_base = OTHER; note = 2-prime-fluoroadenosine
  modified_base 9: mod_base = OTHER; note = 2-prime-O-methyladenosine
  modified_base 10: mod_base = OTHER; note = 2-prime-fluoroguanosine
  modified_base 11: mod_base = gm
  modified_base 12: mod_base = OTHER; note = 2-prime-fluorocytidine
  modified_base 13: mod_base = um
  modified_base 14: mod_base = OTHER; note = 2-prime-fluorocytidine
  modified_base 14..21: mod_base = OTHER; note = Phosphorothioate internucleotide linkage
  modified_base 15: mod_base = um
  modified_base 16: mod_base = OTHER; note = 2-prime-fluoroguanosine
  modified_base 17..18: mod_base = cm
  modified_base 19: mod_base = um
  modified_base 20: mod_base = OTHER; note = 2-prime-fluorocytidine
  modified_base 21: mod_base = um
  source 1..21: mol_type = other RNA
tcccaacaaggctctgcctct

SEQ ID NO: 757 - RNA, 21 nt, synthetic construct
  misc_feature 1..21: note = Polynucleotide
  modified_base 1: mod_base = um
  modified_base 1..3: mod_base = OTHER; note = Phosphorothioate internucleotide linkage
  modified_base 2: mod_base = OTHER; note = 2-prime-fluorocytidine
  modified_base 3: mod_base = cm
  modified_base 4..5: mod_base = OTHER; note = 2-prime-fluorocytidine
  modified_base 6: mod_base = OTHER; note = 2-prime-fluoroadenosine
  modified_base 7: mod_base = OTHER; note = 2-prime-O-methyladenosine
  modified_base 8: mod_base = OTHER; note = 2-prime-fluorocytidine
  modified_base 9: mod_base = OTHER; note = 2-prime-O-methyladenosine
  modified_base 10: mod_base = OTHER; note = 2-prime-fluoroadenosine
  modified_base 11: mod_base = gm
  modified_base 12: mod_base = OTHER; note = 2-prime-fluoroguanosine
  modified_base 13: mod_base = cm
  modified_base 14: mod_base = OTHER; note = 2-prime-fluorouridine
  modified_base 14..21: mod_base = OTHER; note = Phosphorothioate internucleotide linkage
  modified_base 15: mod_base = cm
  modified_base 16: mod_base = OTHER; note = 2-prime-fluorouridine
  modified_base 17: mod_base = gm
  modified_base 18..19: mod_base = cm
  modified_base 20: mod_base = OTHER; note = 2-prime-fluorouridine
  modified_base 21: mod_base = um
  source 1..21: mol_type = other RNA
tccccaacaaggctctgcctt

SEQ ID NO: 758 - RNA, 21 nt, synthetic construct
  misc_feature 1..21: note = Polynucleotide
  modified_base 1: mod_base = um
  modified_base 1..3: mod_base = OTHER; note = Phosphorothioate internucleotide linkage
  modified_base 2: mod_base = OTHER; note = 2-prime-fluorocytidine
  modified_base 3: mod_base = OTHER; note = 2-prime-O-methyladenosine
  modified_base 4..5: mod_base = OTHER; note = 2-prime-fluoroguanosine
  modified_base 6: mod_base = OTHER; note = 2-prime-fluorocytidine
  modified_base 7: mod_base = cm
  modified_base 8: mod_base = OTHER; note = 2-prime-fluorocytidine
  modified_base 9: mod_base = cm
  modified_base 10: mod_base = OTHER; note = 2-prime-fluoroadenosine
  modified_base 11: mod_base = OTHER; note = 2-prime-O-methyladenosine
  modified_base 12: mod_base = OTHER; note = 2-prime-fluorocytidine
  modified_base 13: mod_base = OTHER; note = 2-prime-O-methyladenosine
  modified_base 14: mod_base = OTHER; note = 2-prime-fluoroadenosine
  modified_base 14..21: mod_base = OTHER; note = Phosphorothioate internucleotide linkage
  modified_base 15: mod_base = gm
  modified_base 16: mod_base = OTHER; note = 2-prime-fluoroguanosine
  modified_base 17: mod_base = cm
  modified_base 18: mod_base = um
  modified_base 19: mod_base = cm
  modified_base 20: mod_base = OTHER; note = 2-prime-fluorouridine
  modified_base 21: mod_base = um
  source 1..21: mol_type = other RNA
tcaggccccaacaaggctctt

SEQ ID NO: 759 - RNA, 21 nt, synthetic construct
  misc_feature 1..21: note = Polynucleotide
  modified_base 1: mod_base = um
  modified_base 1..3: mod_base = OTHER; note = Phosphorothioate internucleotide linkage
  modified_base 2: mod_base = OTHER; note = 2-prime-fluoroadenosine
  modified_base 3: mod_base = cm
  modified_base 4: mod_base = OTHER; note = 2-prime-fluoroadenosine
  modified_base 5..6: mod_base = OTHER; note = 2-prime-fluoroguanosine
  modified_base 7: mod_base = cm
  modified_base 8: mod_base = OTHER; note = 2-prime-fluorocytidine
  modified_base 9: mod_base = cm
  modified_base 10: mod_base = OTHER; note = 2-prime-fluorocytidine
  modified_base 11: mod_base = OTHER; note = 2-prime-O-methyladenosine
  modified_base 12: mod_base = OTHER; note = 2-prime-fluoroadenosine
  modified_base 13: mod_base = cm
  modified_base 14: mod_base = OTHER; note = 2-prime-fluoroadenosine
  modified_base 14..21: mod_base = OTHER; note = Phosphorothioate internucleotide linkage
  modified_base 15: mod_base = OTHER; note = 2-prime-O-methyladenosine
  modified_base 16: mod_base = OTHER; note = 2-prime-fluoroguanosine
  modified_base 17: mod_base = gm
  modified_base 18: mod_base = cm
  modified_base 19: mod_base = um
  modified_base 20: mod_base = OTHER; note = 2-prime-fluorocytidine
  modified_base 21: mod_base = um
  source 1..21: mol_type = other RNA
tacaggccccaacaaggctct

SEQ ID NO: 760 - RNA, 21 nt, synthetic construct
  misc_feature 1..21: note = Polynucleotide
  modified_base 1: mod_base = um
  modified_base 1..3: mod_base = OTHER; note = Phosphorothioate internucleotide linkage
  modified_base 2: mod_base = OTHER; note = 2-prime-fluoroguanosine
  modified_base 3: mod_base = OTHER; note = 2-prime-O-methyladenosine
  modified_base 4: mod_base = OTHER; note = 2-prime-fluorocytidine
  modified_base 5: mod_base = OTHER; note = 2-prime-fluoroadenosine
  modified_base 6: mod_base = OTHER; note = 2-prime-fluoroguanosine
  modified_base 7: mod_base = gm
  modified_base 8: mod_base = OTHER; note = 2-prime-fluorocytidine
  modified_base 9: mod_base = cm
  modified_base 10: mod_base = OTHER; note = 2-prime-fluorocytidine
  modified_base 11: mod_base = cm
  modified_base 12: mod_base = OTHER; note = 2-prime-fluoroadenosine
  modified_base 13: mod_base = OTHER; note = 2-prime-O-methyladenosine
  modified_base 14: mod_base = OTHER; note = 2-prime-fluorocytidine
  modified_base 14..21: mod_base = OTHER; note = Phosphorothioate internucleotide linkage
  modified_base 15: mod_base = OTHER; note = 2-prime-O-methyladenosine
  modified_base 16: mod_base = OTHER; note = 2-prime-fluoroadenosine
  modified_base 17..18: mod_base = gm
  modified_base 19: mod_base = cm
  modified_base 20: mod_base = OTHER; note = 2-prime-fluorouridine
  modified_base 21: mod_base = um
  source 1..21: mol_type = other RNA
tgacaggccccaacaaggctt

SEQ ID NO: 761 - RNA, 21 nt, synthetic construct
  misc_feature 1..21: note = Polynucleotide
  modified_base 1: mod_base = um
  modified_base 1..3: mod_base = OTHER; note = Phosphorothioate internucleotide linkage
  modified_base 2: mod_base = OTHER; note = 2-prime-fluoroadenosine
  modified_base 3: mod_base = gm
  modified_base 4: mod_base = OTHER; note = 2-prime-fluoroguanosine
  modified_base 5: mod_base = OTHER; note = 2-prime-fluoroadenosine
  modified_base 6: mod_base = OTHER; note = 2-prime-fluorocytidine
  modified_base 7: mod_base = OTHER; note = 2-prime-O-methyladenosine
  modified_base 8: mod_base = OTHER; note = 2-prime-fluoroguanosine
  modified_base 9: mod_base = gm
  modified_base 10: mod_base = OTHER; note = 2-prime-fluorocytidine
  modified_base 11: mod_base = cm
  modified_base 12: mod_base = OTHER; note = 2-prime-fluorocytidine
  modified_base 13: mod_base = cm
  modified_base 14: mod_base = OTHER; note = 2-prime-fluoroadenosine
  modified_base 14..21: mod_base = OTHER; note = Phosphorothioate internucleotide linkage
  modified_base 15: mod_base = OTHER; note = 2-prime-O-methyladenosine
  modified_base 16: mod_base = OTHER; note = 2-prime-fluorocytidine
  modified_base 17..18: mod_base = OTHER; note = 2-prime-O-methyladenosine
  modified_base 19: mod_base = gm
  modified_base 20: mod_base = OTHER; note = 2-prime-fluoroguanosine
  modified_base 21: mod_base = um
  source 1..21: mol_type = other RNA
taggacaggccccaacaaggt

SEQ ID NO: 762 - RNA, 21 nt, synthetic construct
  misc_feature 1..21: note = Polynucleotide
  modified_base 1: mod_base = um
  modified_base 1..3: mod_base = OTHER; note = Phosphorothioate internucleotide linkage
  modified_base 2: mod_base = OTHER; note = 2-prime-fluoroguanosine
  modified_base 3: mod_base = OTHER; note = 2-prime-O-methyladenosine
  modified_base 4: mod_base = OTHER; note = 2-prime-fluoroadenosine
  modified_base 5..6: mod_base = OTHER; note = 2-prime-fluorouridine
  modified_base 7: mod_base = cm
  modified_base 8: mod_base = OTHER; note = 2-prime-fluoroadenosine
  modified_base 9: mod_base = gm
  modified_base 10: mod_base = OTHER; note = 2-prime-fluoroguanosine
  modified_base 11: mod_base = OTHER; note = 2-prime-O-methyladenosine
  modified_base 12: mod_base = OTHER; note = 2-prime-fluorocytidine
  modified_base 13: mod_base = OTHER; note = 2-prime-O-methyladenosine
  modified_base 14: mod_base = OTHER; note = 2-prime-fluoroguanosine
  modified_base 14..21: mod_base = OTHER; note = Phosphorothioate internucleotide linkage
  modified_base 15: mod_base = gm
  modified_base 16: mod_base = OTHER; note = 2-prime-fluorocytidine
  modified_base 17..19: mod_base = cm
  modified_base 20: mod_base = OTHER; note = 2-prime-fluoroadenosine
  modified_base 21: mod_base = um
  source 1..21: mol_type = other RNA
tgaattcaggacaggccccat

SEQ ID NO: 763 - RNA, 21 nt, synthetic construct
  misc_feature 1..21: note = Polynucleotide
  modified_base 1: mod_base = um
  modified_base 1..3: mod_base = OTHER; note = Phosphorothioate internucleotide linkage
  modified_base 2: mod_base = OTHER; note = 2-prime-fluorouridine
  modified_base 3: mod_base = gm
  modified_base 4..5: mod_base = OTHER; note = 2-prime-fluoroadenosine
  modified_base 6: mod_base = OTHER; note = 2-prime-fluorouridine
  modified_base 7: mod_base = um
  modified_base 8: mod_base = OTHER; note = 2-prime-fluorocytidine
  modified_base 9: mod_base = OTHER; note = 2-prime-O-methyladenosine
  modified_base 10: mod_base = OTHER; note = 2-prime-fluoroguanosine
  modified_base 11: mod_base = gm
  modified_base 12: mod_base = OTHER; note = 2-prime-fluoroadenosine
  modified_base 13: mod_base = cm
  modified_base 14: mod_base = OTHER; note = 2-prime-fluoroadenosine
  modified_base 14..21: mod_base = OTHER; note = Phosphorothioate internucleotide linkage
  modified_base 15: mod_base = gm
  modified_base 16: mod_base = OTHER; note = 2-prime-fluoroguanosine
  modified_base 17..19: mod_base = cm
  modified_base 20: mod_base = OTHER; note = 2-prime-fluorocytidine
  modified_base 21: mod_base = um
  source 1..21: mol_type = other RNA
ttgaattcaggacaggcccct

SEQ ID NO: 764 - RNA, 16 nt, synthetic construct
  misc_feature 1..16: note = Polynucleotide
  modified_base 1: mod_base = OTHER; note = 2-prime-O-methyladenosine
  modified_base 1..3: mod_base = OTHER; note = Phosphorothioate internucleotide linkage
  modified_base 2: mod_base = gm
  modified_base 3: mod_base = um
  modified_base 4: mod_base = OTHER; note = 2-prime-fluorouridine
  modified_base 5: mod_base = um
  modified_base 6: mod_base = OTHER; note = 2-prime-fluoroguanosine
  modified_base 7: mod_base = gm
  modified_base 8: mod_base = OTHER; note = 2-prime-fluoroguanosine
  modified_base 9: mod_base = cm
  modified_base 10: mod_base = OTHER; note = 2-prime-fluorocytidine
  modified_base 11: mod_base = cm
  modified_base 12: mod_base = gm
  modified_base 13: mod_base = cm
  modified_base 14: mod_base = OTHER; note = 2-prime-fluorouridine
  modified_base 14..16: mod_base = OTHER; note = Phosphorothioate internucleotide linkage
  modified_base 15: mod_base = gm
  modified_base 16: mod_base = OTHER; note = 2-prime-O-methyladenosine
  source 1..16: mol_type = other RNA
agtttgggcccgctga

SEQ ID NO: 765 - RNA, 16 nt, synthetic construct
  misc_feature 1..16: note = Polynucleotide
  modified_base 1..3: mod_base = um
  modified_base 1..3: mod_base = OTHER; note = Phosphorothioate internucleotide linkage
  modified_base 4: mod_base = OTHER; note = 2-prime-fluoroguanosine
  modified_base 5: mod_base = gm
  modified_base 6: mod_base = OTHER; note = 2-prime-fluoroguanosine
  modified_base 7: mod_base = cm
  modified_base 8: mod_base = OTHER; note = 2-prime-fluorocytidine
  modified_base 9: mod_base = cm
  modified_base 10: mod_base = OTHER; note = 2-prime-fluoroguanosine
  modified_base 11: mod_base = cm
  modified_base 12: mod_base = um
  modified_base 13: mod_base = gm
  modified_base 14: mod_base = OTHER; note = 2-prime-fluorocytidine
  modified_base 14..16: mod_base = OTHER; note = Phosphorothioate internucleotide linkage
  modified_base 15..16: mod_base = OTHER; note = 2-prime-O-methyladenosine
  source 1..16: mol_type = other RNA
tttgggcccgctgcaa

SEQ ID NO: 766 - RNA, 16 nt, synthetic construct
  misc_feature 1..16: note = Polynucleotide
  modified_base 1..2: mod_base = gm
  modified_base 1..3: mod_base = OTHER; note = Phosphorothioate internucleotide linkage
  modified_base 3: mod_base = cm
  modified_base 4: mod_base = OTHER; note = 2-prime-fluorocytidine
  modified_base 5: mod_base = cm
  modified_base 6: mod_base = OTHER; note = 2-prime-fluoroguanosine
  modified_base 7: mod_base = cm
  modified_base 8: mod_base = OTHER; note = 2-prime-fluorouridine
  modified_base 9: mod_base = gm
  modified_base 10: mod_base = OTHER; note = 2-prime-fluorocytidine
  modified_base 11: mod_base = OTHER; note = 2-prime-O-methyladenosine
  modified_base 12: mod_base = gm
  modified_base 13: mod_base = cm
  modified_base 14: mod_base = OTHER; note = 2-prime-fluorouridine
  modified_base 14..16: mod_base = OTHER; note = Phosphorothioate internucleotide linkage
  modified_base 15: mod_base = cm
  modified_base 16: mod_base = OTHER; note = 2-prime-O-methyladenosine
  source 1..16: mol_type = other RNA
ggcccgctgcagctca

SEQ ID NO: 767 - RNA, 16 nt, synthetic construct
  misc_feature 1..16: note = Polynucleotide
  modified_base 1: mod_base = cm
  modified_base 1..3: mod_base = OTHER; note = Phosphorothioate internucleotide linkage
  modified_base 2: mod_base = um
  modified_base 3: mod_base = gm
  modified_base 4: mod_base = OTHER; note = 2-prime-fluorocytidine
  modified_base 5: mod_base = OTHER; note = 2-prime-O-methyladenosine
  modified_base 6: mod_base = OTHER; note = 2-prime-fluoroguanosine
  modified_base 7: mod_base = cm
  modified_base 8: mod_base = OTHER; note = 2-prime-fluorouridine
  modified_base 9: mod_base = cm
  modified_base 10: mod_base = OTHER; note = 2-prime-fluorocytidine
  modified_base 11: mod_base = cm
  modified_base 12: mod_base = um
  modified_base 13: mod_base = gm
  modified_base 14: mod_base = OTHER; note = 2-prime-fluorouridine
  modified_base 14..16: mod_base = OTHER; note = Phosphorothioate internucleotide linkage
  modified_base 15: mod_base = cm
  modified_base 16: mod_base = OTHER; note = 2-prime-O-methyladenosine
  source 1..16: mol_type = other RNA
ctgcagctccctgtca

SEQ ID NO: 768 - RNA, 16 nt, synthetic construct
  misc_feature 1..16: note = Polynucleotide
  modified_base 1: mod_base = cm
  modified_base 1..3: mod_base = OTHER; note = Phosphorothioate internucleotide linkage
  modified_base 2: mod_base = um
  modified_base 3: mod_base = gm
  modified_base 4: mod_base = OTHER; note = 2-prime-fluorouridine
  modified_base 5: mod_base = cm
  modified_base 6: mod_base = OTHER; note = 2-prime-fluorocytidine
  modified_base 7: mod_base = cm
  modified_base 8: mod_base = OTHER; note = 2-prime-fluoroguanosine
  modified_base 9: mod_base = gm
  modified_base 10: mod_base = OTHER; note = 2-prime-fluorocytidine
  modified_base 11..13: mod_base = gm
  modified_base 14: mod_base = OTHER; note = 2-prime-fluorouridine
  modified_base 14..16: mod_base = OTHER; note = Phosphorothioate internucleotide linkage
  modified_base 15: mod_base = cm
  modified_base 16: mod_base = OTHER; note = 2-prime-O-methyladenosine
  source 1..16: mol_type = other RNA
ctgtcccggcgggtca

SEQ ID NO: 769 - RNA, 16 nt, synthetic construct
  misc_feature 1..16: note = Polynucleotide
  modified_base 1: mod_base = um
  modified_base 1..3: mod_base = OTHER; note = Phosphorothioate internucleotide linkage
  modified_base 2..3: mod_base = cm
  modified_base 4: mod_base = OTHER; note = 2-prime-fluorocytidine
  modified_base 5: mod_base = OTHER; note = 2-prime-O-methyladenosine
  modified_base 6: mod_base = OTHER; note = 2-prime-fluoroguanosine
  modified_base 7: mod_base = gm
  modified_base 8: mod_base = OTHER; note = 2-prime-fluorocytidine
  modified_base 9: mod_base = um
  modified_base 10: mod_base = OTHER; note = 2-prime-fluoroadenosine
  modified_base 11: mod_base = cm
  modified_base 12..13: mod_base = gm
  modified_base 14: mod_base = OTHER; note = 2-prime-fluorocytidine
  modified_base 14..16: mod_base = OTHER; note = Phosphorothioate internucleotide linkage
  modified_base 15: mod_base = gm
  modified_base 16: mod_base = OTHER; note = 2-prime-O-methyladenosine
  source 1..16: mol_type = other RNA
tcccaggctacggcga

SEQ ID NO: 770 - RNA, 16 nt, synthetic construct
  misc_feature 1..16: note = Polynucleotide
  modified_base 1..2: mod_base = cm
  modified_base 1..3: mod_base = OTHER; note = Phosphorothioate internucleotide linkage
  modified_base 3: mod_base = OTHER; note = 2-prime-O-methyladenosine
  modified_base 4: mod_base = OTHER; note = 2-prime-fluoroguanosine
  modified_base 5: mod_base = gm
  modified_base 6: mod_base = OTHER; note = 2-prime-fluorocytidine
  modified_base 7: mod_base = um
  modified_base 8: mod_base = OTHER; note = 2-prime-fluoroadenosine
  modified_base 9: mod_base = cm
  modified_base 10: mod_base = OTHER; note = 2-prime-fluoroguanosine
  modified_base 11: mod_base = gm
  modified_base 12: mod_base = cm
  modified_base 13: mod_base = gm
  modified_base 14: mod_base = OTHER; note = 2-prime-fluoroguanosine
  modified_base 14..16: mod_base = OTHER; note = Phosphorothioate internucleotide linkage
  modified_base 15: mod_base = gm
  modified_base 16: mod_base = OTHER; note = 2-prime-O-methyladenosine
  source 1..16: mol_type = other RNA
ccaggctacggcggga

SEQ ID NO: 771 - RNA, 16 nt, synthetic construct
  misc_feature 1..16: note = Polynucleotide
  modified_base 1..2: mod_base = gm
  modified_base 1..3: mod_base = OTHER; note = Phosphorothioate internucleotide linkage
  modified_base 3: mod_base = cm
  modified_base 4: mod_base = OTHER; note = 2-prime-fluorouridine
  modified_base 5: mod_base = OTHER; note = 2-prime-O-methyladenosine
  modified_base 6: mod_base = OTHER; note = 2-prime-fluorocytidine
  modified_base 7: mod_base = gm
  modified_base 8: mod_base = OTHER; note = 2-prime-fluoroguanosine
  modified_base 9: mod_base = cm
  modified_base 10: mod_base = OTHER; note = 2-prime-fluoroguanosine
  modified_base 11..13: mod_base = gm
  modified_base 14: mod_base = OTHER; note = 2-prime-fluoroadenosine
  modified_base 14..16: mod_base = OTHER; note = Phosphorothioate internucleotide linkage
  modified_base 15: mod_base = um
  modified_base 16: mod_base = OTHER; note = 2-prime-O-methyladenosine
  source 1..16: mol_type = other RNA
ggctacggcggggata

SEQ ID NO: 772 - RNA, 16 nt, synthetic construct
  misc_feature 1..16: note = Polynucleotide
  modified_base 1: mod_base = gm
  modified_base 1..3: mod_base = OTHER; note = Phosphorothioate internucleotide linkage
  modified_base 2: mod_base = cm
  modified_base 3: mod_base = um
  modified_base 4: mod_base = OTHER; note = 2-prime-fluoroadenosine
  modified_base 5: mod_base = cm
  modified_base 6: mod_base = OTHER; note = 2-prime-fluoroguanosine
  modified_base 7: mod_base = gm
  modified_base 8: mod_base = OTHER; note = 2-prime-fluorocytidine
  modified_base 9: mod_base = gm
  modified_base 10: mod_base = OTHER; note = 2-prime-fluoroguanosine
  modified_base 11..12: mod_base = gm
  modified_base 13: mod_base = OTHER; note = 2-prime-O-methyladenosine
  modified_base 14: mod_base = OTHER; note = 2-prime-fluorouridine
  modified_base 14..16: mod_base = OTHER; note = Phosphorothioate internucleotide linkage
  modified_base 15: mod_base = gm
  modified_base 16: mod_base = OTHER; note = 2-prime-O-methyladenosine
  source 1..16: mol_type = other RNA
gctacggcggggatga

SEQ ID NO: 773 - RNA, 16 nt, synthetic construct
  misc_feature 1..16: note = Polynucleotide
  modified_base 1: mod_base = gm
  modified_base 1..3: mod_base = OTHER; note = Phosphorothioate internucleotide linkage
  modified_base 2: mod_base = cm
  modified_base 3: mod_base = gm
  modified_base 4: mod_base = OTHER; note = 2-prime-fluoroguanosine
  modified_base 5: mod_base = gm
  modified_base 6: mod_base = OTHER; note = 2-prime-fluoroguanosine
  modified_base 7: mod_base = OTHER; note = 2-prime-O-methyladenosine
  modified_base 8: mod_base = OTHER; note = 2-prime-fluorouridine
  modified_base 9: mod_base = gm
  modified_base 10: mod_base = OTHER; note = 2-prime-fluoroguanosine
  modified_base 11: mod_base = cm
  modified_base 12..13: mod_base = gm
  modified_base 14: mod_base = OTHER; note = 2-prime-fluorouridine
  modified_base 14..16: mod_base = OTHER; note = Phosphorothioate internucleotide linkage
  modified_base 15..16: mod_base = OTHER; note = 2-prime-O-methyladenosine
  source 1..16: mol_type = other RNA
gcggggatggcggtaa

SEQ ID NO: 774 - RNA, 16 nt, synthetic construct
  misc_feature 1..16: note = Polynucleotide
  modified_base 1: mod_base = cm
  modified_base 1..3: mod_base = OTHER; note = Phosphorothioate internucleotide linkage
  modified_base 2..3: mod_base = gm
  modified_base 4: mod_base = OTHER; note = 2-prime-fluoroguanosine
  modified_base 5: mod_base = gm
  modified_base 6: mod_base = OTHER; note = 2-prime-fluoroadenosine
  modified_base 7: mod_base = um
  modified_base 8: mod_base = OTHER; note = 2-prime-fluoroguanosine
  modified_base 9: mod_base = gm
  modified_base 10: mod_base = OTHER; note = 2-prime-fluorocytidine
  modified_base 11..12: mod_base = gm
  modified_base 13: mod_base = um
  modified_base 14: mod_base = OTHER; note = 2-prime-fluoroadenosine
  modified_base 14..16: mod_base = OTHER; note = Phosphorothioate internucleotide linkage
  modified_base 15..16: mod_base = OTHER; note = 2-prime-O-methyladenosine
  source 1..16: mol_type = other RNA
cggggatggcggtaaa

SEQ ID NO: 775 - RNA, 16 nt, synthetic construct
  misc_feature 1..16: note = Polynucleotide
  modified_base 1: mod_base = OTHER; note = 2-prime-O-methyladenosine
  modified_base 1..3: mod_base = OTHER; note = Phosphorothioate internucleotide linkage
  modified_base 2: mod_base = um
  modified_base 3: mod_base = gm
  modified_base 4: mod_base = OTHER; note = 2-prime-fluoroguanosine
  modified_base 5: mod_base = cm
  modified_base 6: mod_base = OTHER; note = 2-prime-fluoroguanosine
  modified_base 7: mod_base = gm
  modified_base 8: mod_base = OTHER; note = 2-prime-fluorouridine
  modified_base 9: mod_base = OTHER; note = 2-prime-O-methyladenosine
  modified_base 10: mod_base = OTHER; note = 2-prime-fluoroadenosine
  modified_base 11..13: mod_base = cm
  modified_base 14: mod_base = OTHER; note = 2-prime-fluorouridine
  modified_base 14..16: mod_base = OTHER; note = Phosphorothioate internucleotide linkage
  modified_base 15: mod_base = gm
  modified_base 16: mod_base = OTHER; note = 2-prime-O-methyladenosine
  source 1..16: mol_type = other RNA
atggcggtaaccctga

SEQ ID NO: 776 - RNA, 16 nt, synthetic construct
  misc_feature 1..16: note = Polynucleotide
  modified_base 1: mod_base = gm
  modified_base 1..3: mod_base = OTHER; note = Phosphorothioate internucleotide linkage
  modified_base 2: mod_base = cm
  modified_base 3: mod_base = gm
  modified_base 4: mod_base = OTHER; note = 2-prime-fluoroguanosine
  modified_base 5: mod_base = um
  modified_base 6: mod_base = OTHER; note = 2-prime-fluoroadenosine
  modified_base 7: mod_base = OTHER; note = 2-prime-O-methyladenosine
  modified_base 8: mod_base = OTHER; note = 2-prime-fluorocytidine
  modified_base 9: mod_base = cm
  modified_base 10: mod_base = OTHER; note = 2-prime-fluorocytidine
  modified_base 11: mod_base = um
  modified_base 12: mod_base = gm
  modified_base 13: mod_base = cm
  modified_base 14: mod_base = OTHER; note = 2-prime-fluoroadenosine
  modified_base 14..16: mod_base = OTHER; note = Phosphorothioate internucleotide linkage
  modified_base 15: mod_base = gm
  modified_base 16: mod_base = OTHER; note = 2-prime-O-methyladenosine
  source 1..16: mol_type = other RNA
gcggtaaccctgcaga

SEQ ID NO: 777 - RNA, 16 nt, synthetic construct
  misc_feature 1..16: note = Polynucleotide
  modified_base 1: mod_base = gm
  modified_base 1..3: mod_base = OTHER; note = Phosphorothioate internucleotide linkage
  modified_base 2: mod_base = um
  modified_base 3: mod_base = OTHER; note = 2-prime-O-methyladenosine
  modified_base 4: mod_base = OTHER; note = 2-prime-fluoroadenosine
  modified_base 5: mod_base = cm
  modified_base 6: mod_base = OTHER; note = 2-prime-fluorocytidine
  modified_base 7: mod_base = cm
  modified_base 8: mod_base = OTHER; note = 2-prime-fluorouridine
  modified_base 9: mod_base = gm
  modified_base 10: mod_base = OTHER; note = 2-prime-fluorocytidine
  modified_base 11: mod_base = OTHER; note = 2-prime-O-methyladenosine
  modified_base 12: mod_base = gm
  modified_base 13: mod_base = cm
  modified_base 14: mod_base = OTHER; note = 2-prime-fluorocytidine
  modified_base 14..16: mod_base = OTHER; note = Phosphorothioate internucleotide linkage
  modified_base 15: mod_base = um
  modified_base 16: mod_base = OTHER; note = 2-prime-O-methyladenosine
  source 1..16: mol_type = other RNA
gtaaccctgcagccta

SEQ ID NO: 778 - RNA, 16 nt, synthetic construct
  misc_feature 1..16: note = Polynucleotide
  modified_base 1: mod_base = um
  modified_base 1..3: mod_base = OTHER; note = Phosphorothioate internucleotide linkage
  modified_base 2..3: mod_base = OTHER; note = 2-prime-O-methyladenosine
  modified_base 4: mod_base = OTHER; note = 2-prime-fluorocytidine
  modified_base 5: mod_base = cm
  modified_base 6: mod_base = OTHER; note = 2-prime-fluorocytidine
  modified_base 7: mod_base = um
  modified_base 8: mod_base = OTHER; note = 2-prime-fluoroguanosine
  modified_base 9: mod_base = cm
  modified_base 10: mod_base = OTHER; note = 2-prime-fluoroadenosine
  modified_base 11: mod_base = gm
  modified_base 12..13: mod_base = cm
  modified_base 14: mod_base = OTHER; note = 2-prime-fluorouridine
  modified_base 14..16: mod_base = OTHER; note = Phosphorothioate internucleotide linkage
  modified_base 15: mod_base = gm
  modified_base 16: mod_base = OTHER; note = 2-prime-O-methyladenosine
  source 1..16: mol_type = other RNA
taaccctgcagcctga

SEQ ID NO: 779 - RNA, 16 nt, synthetic construct
  misc_feature 1..16: note = Polynucleotide
  modified_base 1: mod_base = OTHER; note = 2-prime-O-methyladenosine
  modified_base 1..3: mod_base = OTHER; note = Phosphorothioate internucleotide linkage
  modified_base 2..3: mod_base = cm
  modified_base 4: mod_base = OTHER; note = 2-prime-fluorocytidine
  modified_base 5: mod_base = um
  modified_base 6: mod_base = OTHER; note = 2-prime-fluoroguanosine
  modified_base 7: mod_base = cm
  modified_base 8: mod_base = OTHER; note = 2-prime-fluoroadenosine
  modified_base 9: mod_base = gm
  modified_base 10: mod_base = OTHER; note = 2-prime-fluorocytidine
  modified_base 11: mod_base = cm
  modified_base 12: mod_base = um
  modified_base 13: mod_base = gm
  modified_base 14: mod_base = OTHER; note = 2-prime-fluorocytidine
  modified_base 14..16: mod_base = OTHER; note = Phosphorothioate internucleotide linkage
  modified_base 15: mod_base = gm
  modified_base 16: mod_base = OTHER; note = 2-prime-O-methyladenosine
  source 1..16: mol_type = other RNA
accctgcagcctgcga

SEQ ID NO: 780 - RNA, 16 nt, synthetic construct
  misc_feature 1..16: note = Polynucleotide
  modified_base 1..2: mod_base = cm
  modified_base 1..3: mod_base = OTHER; note = Phosphorothioate internucleotide linkage
  modified_base 3: mod_base = gm
  modified_base 4: mod_base = OTHER; note = 2-prime-fluoroguanosine
  modified_base 5: mod_base = cm
  modified_base 6: mod_base = OTHER; note = 2-prime-fluoroguanosine
  modified_base 7: mod_base = OTHER; note = 2-prime-O-methyladenosine
  modified_base 8: mod_base = OTHER; note = 2-prime-fluorocytidine
  modified_base 9: mod_base = OTHER; note = 2-prime-O-methyladenosine
  modified_base 10: mod_base = OTHER; note = 2-prime-fluorocytidine
  modified_base 11: mod_base = gm
  modified_base 12..13: mod_base = OTHER; note = 2-prime-O-methyladenosine
  modified_base 14: mod_base = OTHER; note = 2-prime-fluorocytidine
  modified_base 14..16: mod_base = OTHER; note = Phosphorothioate internucleotide linkage
  modified_base 15: mod_base = cm
  modified_base 16: mod_base = OTHER; note = 2-prime-O-methyladenosine
  source 1..16: mol_type = other RNA
ccggcgacacgaacca

SEQ ID NO: 781 - RNA, 16 nt, synthetic construct
  misc_feature 1..16: note = Polynucleotide
  modified_base 1: mod_base = gm
  modified_base 1..3: mod_base = OTHER; note = Phosphorothioate internucleotide linkage
  modified_base 2: mod_base = cm
  modified_base 3: mod_base = OTHER; note = 2-prime-O-methyladenosine
  modified_base 4: mod_base = OTHER; note = 2-prime-fluoroguanosine
  modified_base 5: mod_base = OTHER; note = 2-prime-O-methyladenosine
  modified_base 6: mod_base = OTHER; note = 2-prime-fluoroguanosine
  modified_base 7: mod_base = OTHER; note = 2-prime-O-methyladenosine
  modified_base 8: mod_base = OTHER; note = 2-prime-fluorocytidine
  modified_base 9: mod_base = OTHER; note = 2-prime-O-methyladenosine
  modified_base 10: mod_base = OTHER; note = 2-prime-fluoroguanosine
  modified_base 11: mod_base = OTHER; note = 2-prime-O-methyladenosine
  modified_base 12: mod_base = gm
  modified_base 13: mod_base = um
  modified_base 14: mod_base = OTHER; note = 2-prime-fluoroguanosine
  modified_base 14..16: mod_base = OTHER; note = Phosphorothioate internucleotide linkage
  modified_base 15..16: mod_base = OTHER; note = 2-prime-O-methyladenosine
  source 1..16: mol_type = other RNA
gcagagacagagtgaa

SEQ ID NO: 782 - RNA, 16 nt, synthetic construct
  misc_feature 1..16: note = Polynucleotide
  modified_base 1: mod_base = gm
  modified_base 1..3: mod_base = OTHER; note = Phosphorothioate internucleotide linkage
  modified_base 2: mod_base = OTHER; note = 2-prime-O-methyladenosine
  modified_base 3: mod_base = gm
  modified_base 4: mod_base = OTHER; note = 2-prime-fluoroadenosine
  modified_base 5: mod_base = cm
  modified_base 6: mod_base = OTHER; note = 2-prime-fluoroadenosine
  modified_base 7: mod_base = gm
  modified_base 8: mod_base = OTHER; note = 2-prime-fluoroadenosine
  modified_base 9: mod_base = gm
  modified_base 10: mod_base = OTHER; note = 2-prime-fluorouridine
  modified_base 11: mod_base = gm
  modified_base 12: mod_base = OTHER; note = 2-prime-O-methyladenosine
  modified_base 13: mod_base = cm
  modified_base 14: mod_base = OTHER; note = 2-prime-fluorocytidine
  modified_base 14..16: mod_base = OTHER; note = Phosphorothioate internucleotide linkage
  modified_base 15: mod_base = cm
  modified_base 16: mod_base = OTHER; note = 2-prime-O-methyladenosine
  source 1..16: mol_type = other RNA
gagacagagtgaccca

SEQ ID NO: 783 - RNA, 16 nt, synthetic construct
  misc_feature 1..16: note = Polynucleotide
  modified_base 1: mod_base = OTHER; note = 2-prime-O-methyladenosine
  modified_base 1..3: mod_base = OTHER; note = Phosphorothioate internucleotide linkage
  modified_base 2: mod_base = gm
  modified_base 3: mod_base = OTHER; note = 2-prime-O-methyladenosine
  modified_base 4: mod_base = OTHER; note = 2-prime-fluoroguanosine
  modified_base 5: mod_base = um
  modified_base 6: mod_base = OTHER; note = 2-prime-fluoroguanosine
  modified_base 7: mod_base = OTHER; note = 2-prime-O-methyladenosine
  modified_base 8: mod_base = OTHER; note = 2-prime-fluorocytidine
  modified_base 9: mod_base = cm
  modified_base 10: mod_base = OTHER; note = 2-prime-fluorocytidine
  modified_base 11: mod_base = OTHER; note = 2-prime-O-methyladenosine
  modified_base 12: mod_base = gm
  modified_base 13: mod_base = cm
  modified_base 14: mod_base = OTHER; note = 2-prime-fluoroadenosine
  modified_base 14..16: mod_base = OTHER; note = Phosphorothioate internucleotide linkage
  modified_base 15..16: mod_base = OTHER; note = 2-prime-O-methyladenosine
  source 1..16: mol_type = other RNA
agagtgacccagcaaa

SEQ ID NO: 784 - RNA, 16 nt, synthetic construct
  misc_feature 1..16: note = Polynucleotide
  modified_base 1..2: mod_base = cm
  modified_base 1..3: mod_base = OTHER; note = Phosphorothioate internucleotide linkage
  modified_base 3: mod_base = OTHER; note = 2-prime-O-methyladenosine
  modified_base 4: mod_base = OTHER; note = 2-prime-fluoroguanosine
  modified_base 5: mod_base = OTHER; note = 2-prime-O-methyladenosine
  modified_base 6: mod_base = OTHER; note = 2-prime-fluoroguanosine
  modified_base 7: mod_base = cm
  modified_base 8: mod_base = OTHER; note = 2-prime-fluorocytidine
  modified_base 9: mod_base = cm
  modified_base 10: mod_base = OTHER; note = 2-prime-fluoroadenosine
  modified_base 11: mod_base = um
  modified_base 12: mod_base = gm
  modified_base 13: mod_base = OTHER; note = 2-prime-O-methyladenosine
  modified_base 14: mod_base = OTHER; note = 2-prime-fluoroguanosine
  modified_base 14..16: mod_base = OTHER; note = Phosphorothioate internucleotide linkage
  modified_base 15: mod_base = gm
  modified_base 16: mod_base = OTHER; note = 2-prime-O-methyladenosine
  source 1..16: mol_type = other RNA
ccagagcccatgagga

SEQ ID NO: 785 - RNA, 16 nt, synthetic construct
  misc_feature 1..16: note = Polynucleotide
  modified_base 1..2: mod_base = cm
  modified_base 1..3: mod_base = OTHER; note = Phosphorothioate internucleotide linkage
  modified_base 3: mod_base = OTHER; note = 2-prime-O-methyladenosine
  modified_base 4: mod_base = OTHER; note = 2-prime-fluorouridine
  modified_base 5: mod_base = gm
  modified_base 6: mod_base = OTHER; note = 2-prime-fluoroadenosine
  modified_base 7: mod_base = gm
  modified_base 8: mod_base = OTHER; note = 2-prime-fluoroguanosine
  modified_base 9: mod_base = gm
  modified_base 10: mod_base = OTHER; note = 2-prime-fluoroadenosine
  modified_base 11: mod_base = cm
  modified_base 12: mod_base = OTHER; note = 2-prime-O-methyladenosine
  modified_base 13: mod_base = cm
  modified_base 14: mod_base = OTHER; note = 2-prime-fluorocytidine
  modified_base 14..16: mod_base = OTHER; note = Phosphorothioate internucleotide linkage
  modified_base 15: mod_base = cm
  modified_base 16: mod_base = OTHER; note = 2-prime-O-methyladenosine
  source 1..16: mol_type = other RNA
ccatgagggacaccca

SEQ ID NO: 786 - RNA, 16 nt, synthetic construct
  misc_feature 1..16: note = Polynucleotide
  modified_base 1..3: mod_base = cm
  modified_base 1..3: mod_base = OTHER; note = Phosphorothioate internucleotide linkage
  modified_base 4: mod_base = OTHER; note = 2-prime-fluorocytidine
  modified_base 5: mod_base = gm
  modified_base 6: mod_base = OTHER; note = 2-prime-fluorocytidine
  modified_base 7: mod_base = um
  modified_base 8: mod_base = OTHER; note = 2-prime-fluorocytidine
  modified_base 9: mod_base = cm
  modified_base 10: mod_base = OTHER; note = 2-prime-fluorocytidine
  modified_base 11: mod_base = um
  modified_base 12: mod_base = cm
  modified_base 13: mod_base = OTHER; note = 2-prime-O-methyladenosine
  modified_base 14: mod_base = OTHER; note = 2-prime-fluorocytidine
  modified_base 14..16: mod_base = OTHER; note = Phosphorothioate internucleotide linkage
  modified_base 15: mod_base = um
  modified_base 16: mod_base = OTHER; note = 2-prime-O-methyladenosine
  source 1..16: mol_type = other RNA
ccccgctccctcacta

SEQ ID NO: 787 - RNA, 16 nt, synthetic construct
  misc_feature 1..16: note = Polynucleotide
  modified_base 1..3: mod_base = cm
  modified_base 1..3: mod_base = OTHER; note = Phosphorothioate internucleotide linkage
  modified_base 4: mod_base = OTHER; note = 2-prime-fluoroguanosine
  modified_base 5: mod_base = cm
  modified_base 6: mod_base = OTHER; note = 2-prime-fluorouridine
  modified_base 7: mod_base = cm
  modified_base 8: mod_base = OTHER; note = 2-prime-fluorocytidine
  modified_base 9: mod_base = cm
  modified_base 10: mod_base = OTHER; note = 2-prime-fluorouridine
  modified_base 11: mod_base = cm
  modified_base 12: mod_base = OTHER; note = 2-prime-O-methyladenosine
  modified_base 13: mod_base = cm
  modified_base 14: mod_base = OTHER; note = 2-prime-fluorouridine
  modified_base 14..16: mod_base = OTHER; note = Phosphorothioate internucleotide linkage
  modified_base 15: mod_base = um
  modified_base 16: mod_base = OTHER; note = 2-prime-O-methyladenosine
  source 1..16: mol_type = other RNA
cccgctccctcactta

SEQ ID NO: 788 - RNA, 16 nt, synthetic construct
  misc_feature 1..16: note = Polynucleotide
  modified_base 1..2: mod_base = cm
  modified_base 1..3: mod_base = OTHER; note = Phosphorothioate internucleotide linkage
  modified_base 3: mod_base = gm
  modified_base 4: mod_base = OTHER; note = 2-prime-fluorocytidine
  modified_base 5: mod_base = um
  modified_base 6: mod_base = OTHER; note = 2-prime-fluorocytidine
  modified_base 7: mod_base = cm
  modified_base 8: mod_base = OTHER; note = 2-prime-fluorocytidine
  modified_base 9: mod_base = um
  modified_base 10: mod_base = OTHER; note = 2-prime-fluorocytidine
  modified_base 11: mod_base = OTHER; note = 2-prime-O-methyladenosine
  modified_base 12: mod_base = cm
  modified_base 13: mod_base = um
  modified_base 14: mod_base = OTHER; note = 2-prime-fluorouridine
  modified_base 14..16: mod_base = OTHER; note = Phosphorothioate internucleotide linkage
  modified_base 15: mod_base = gm
  modified_base 16: mod_base = OTHER; note = 2-prime-O-methyladenosine
  source 1..16: mol_type = other RNA
ccgctccctcacttga

SEQ ID NO: 789 - RNA, 16 nt, synthetic construct
  misc_feature 1..16: note = Polynucleotide
  modified_base 1: mod_base = cm
  modified_base 1..3: mod_base = OTHER; note = Phosphorothioate internucleotide linkage
  modified_base 2: mod_base = gm
  modified_base 3: mod_base = cm
  modified_base 4: mod_base = OTHER; note = 2-prime-fluorouridine
  modified_base 5: mod_base = cm
  modified_base 6: mod_base = OTHER; note = 2-prime-fluorocytidine
  modified_base 7: mod_base = cm
  modified_base 8: mod_base = OTHER; note = 2-prime-fluorouridine
  modified_base 9: mod_base = cm
  modified_base 10: mod_base = OTHER; note = 2-prime-fluoroadenosine
  modified_base 11: mod_base = cm
  modified_base 12..13: mod_base = um
  modified_base 14: mod_base = OTHER; note = 2-prime-fluoroguanosine
  modified_base 14..16: mod_base = OTHER; note = Phosphorothioate internucleotide linkage
  modified_base 15: mod_base = gm
  modified_base 16: mod_base = OTHER; note = 2-prime-O-methyladenosine
  source 1..16: mol_type = other RNA
cgctccctcacttgga

SEQ ID NO: 790 - RNA, 16 nt, synthetic construct
  misc_feature 1..16: note = Polynucleotide
  modified_base 1: mod_base = cm
  modified_base 1..3: mod_base = OTHER; note = Phosphorothioate internucleotide linkage
  modified_base 2: mod_base = um
  modified_base 3: mod_base = cm
  modified_base 4: mod_base = OTHER; note = 2-prime-fluorocytidine
  modified_base 5: mod_base = cm
  modified_base 6: mod_base = OTHER; note = 2-prime-fluorouridine
  modified_base 7: mod_base = cm
  modified_base 8: mod_base = OTHER; note = 2-prime-fluoroadenosine
  modified_base 9: mod_base = cm
  modified_base 10: mod_base = OTHER; note = 2-prime-fluorouridine
  modified_base 11: mod_base = um
  modified_base 12..13: mod_base = gm
  modified_base 14: mod_base = OTHER; note = 2-prime-fluoroguanosine
  modified_base 14..16: mod_base = OTHER; note = Phosphorothioate internucleotide linkage
  modified_base 15: mod_base = um
  modified_base 16: mod_base = OTHER; note = 2-prime-O-methyladenosine
  source 1..16: mol_type = other RNA
ctccctcacttgggta

SEQ ID NO: 791 - RNA, 16 nt, synthetic construct
  misc_feature 1..16: note = Polynucleotide
  modified_base 1..3: mod_base = cm
  modified_base 1..3: mod_base = OTHER; note = Phosphorothioate internucleotide linkage
  modified_base 4: mod_base = OTHER; note = 2-prime-fluorouridine
  modified_base 5: mod_base = cm
  modified_base 6: mod_base = OTHER; note = 2-prime-fluoroadenosine
  modified_base 7: mod_base = cm
  modified_base 8: mod_base = OTHER; note = 2-prime-fluorouridine
  modified_base 9: mod_base = um
  modified_base 10: mod_base = OTHER; note = 2-prime-fluoroguanosine
  modified_base 11..12: mod_base = gm
  modified_base 13: mod_base = um
  modified_base 14: mod_base = OTHER; note = 2-prime-fluorocytidine
  modified_base 14..16: mod_base = OTHER; note = Phosphorothioate internucleotide linkage
  modified_base 15: mod_base = um
  modified_base 16: mod_base = OTHER; note = 2-prime-O-methyladenosine
  source 1..16: mol_type = other RNA
ccctcacttgggtcta

SEQ ID NO: 792 - RNA, 16 nt, synthetic construct
  misc_feature 1..16: note = Polynucleotide
  modified_base 1..2: mod_base = cm
  modified_base 1..3: mod_base = OTHER; note = Phosphorothioate internucleotide linkage
  modified_base 3: mod_base = um
  modified_base 4: mod_base = OTHER; note = 2-prime-fluorocytidine
  modified_base 5: mod_base = OTHER; note = 2-prime-O-methyladenosine
  modified_base 6: mod_base = OTHER; note = 2-prime-fluorocytidine
  modified_base 7: mod_base = um
  modified_base 8: mod_base = OTHER; note = 2-prime-fluorouridine
  modified_base 9: mod_base = gm
  modified_base 10: mod_base = OTHER; note = 2-prime-fluoroguanosine
  modified_base 11: mod_base = gm
  modified_base 12: mod_base = um
  modified_base 13: mod_base = cm
  modified_base 14: mod_base = OTHER; note = 2-prime-fluorouridine
  modified_base 14..16: mod_base = OTHER; note = Phosphorothioate internucleotide linkage
  modified_base 15: mod_base = um
  modified_base 16: mod_base = OTHER; note = 2-prime-O-methyladenosine
  source 1..16: mol_type = other RNA
cctcacttgggtctta

SEQ ID NO: 793 - RNA, 16 nt, synthetic construct
  misc_feature 1..16: note = Polynucleotide
  modified_base 1: mod_base = um
  modified_base 1..3: mod_base = OTHER; note = Phosphorothioate internucleotide linkage
  modified_base 2: mod_base = cm
  modified_base 3: mod_base = OTHER; note = 2-prime-O-methyladenosine
  modified_base 4: mod_base = OTHER; note = 2-prime-fluorocytidine
  modified_base 5: mod_base = um
  modified_base 6: mod_base = OTHER; note = 2-prime-fluorouridine
  modified_base 7: mod_base = gm
  modified_base 8: mod_base = OTHER; note = 2-prime-fluoroguanosine
  modified_base 9: mod_base = gm
  modified_base 10: mod_base = OTHER; note = 2-prime-fluorouridine
  modified_base 11: mod_base = cm
  modified_base 12..13: mod_base = um
  modified_base 14: mod_base = OTHER; note = 2-prime-fluorocytidine
  modified_base 14..16: mod_base = OTHER; note = Phosphorothioate internucleotide linkage
  modified_base 15: mod_base = cm
  modified_base 16: mod_base = OTHER; note = 2-prime-O-methyladenosine
  source 1..16: mol_type = other RNA
tcacttgggtcttcca

SEQ ID NO: 794 - RNA, 16 nt, synthetic construct
  misc_feature 1..16: note = Polynucleotide
  modified_base 1..3: mod_base = gm
  modified_base 1..3: mod_base = OTHER; note = Phosphorothioate internucleotide linkage
  modified_base 4: mod_base = OTHER; note = 2-prime-fluorouridine
  modified_base 5: mod_base = cm
  modified_base 6: mod_base = OTHER; note = 2-prime-fluorouridine
  modified_base 7: mod_base = um
  modified_base 8: mod_base = OTHER; note = 2-prime-fluorocytidine
  modified_base 9: mod_base = cm
  modified_base 10: mod_base = OTHER; note = 2-prime-fluorocytidine
  modified_base 11..12: mod_base = um
  modified_base 13: mod_base = gm
  modified_base 14: mod_base = OTHER; note = 2-prime-fluorouridine
  modified_base 14..16: mod_base = OTHER; note = Phosphorothioate internucleotide linkage
  modified_base 15: mod_base = cm
  modified_base 16: mod_base = OTHER; note = 2-prime-O-methyladenosine
  source 1..16: mol_type = other RNA
gggtcttcccttgtca

SEQ ID NO: 795 - RNA, 16 nt, synthetic construct
  misc_feature 1..16: note = Polynucleotide
  modified_base 1: mod_base = um
  modified_base 1..3: mod_base = OTHER; note = Phosphorothioate internucleotide linkage
  modified_base 2: mod_base = cm
  modified_base 3: mod_base = um
  modified_base 4: mod_base = OTHER; note = 2-prime-fluorouridine
  modified_base 5: mod_base = cm
  modified_base 6: mod_base = OTHER; note = 2-prime-fluorocytidine
  modified_base 7: mod_base = cm
  modified_base 8: mod_base = OTHER; note = 2-prime-fluorouridine
  modified_base 9: mod_base = um
  modified_base 10: mod_base = OTHER; note = 2-prime-fluoroguanosine
  modified_base 11: mod_base = um
  modified_base 12..13: mod_base = cm
  modified_base 14: mod_base = OTHER; note = 2-prime-fluorouridine
  modified_base 14..16: mod_base = OTHER; note = Phosphorothioate internucleotide linkage
  modified_base 15: mod_base = cm
  modified_base 16: mod_base = OTHER; note = 2-prime-O-methyladenosine
  source 1..16: mol_type = other RNA
tcttcccttgtcctca

SEQ ID NO: 796 - RNA, 16 nt, synthetic construct
  misc_feature 1..16: note = Polynucleotide
  modified_base 1..3: mod_base = cm
  modified_base 1..3: mod_base = OTHER; note = Phosphorothioate internucleotide linkage
  modified_base 4: mod_base = OTHER; note = 2-prime-fluorouridine
  modified_base 5: mod_base = um
  modified_base 6: mod_base = OTHER; note = 2-prime-fluoroguanosine
  modified_base 7: mod_base = um
  modified_base 8: mod_base = OTHER; note = 2-prime-fluorocytidine
  modified_base 9: mod_base = cm
  modified_base 10: mod_base = OTHER; note = 2-prime-fluorouridine
  modified_base 11: mod_base = cm
  modified_base 12: mod_base = um
  modified_base 13: mod_base = cm
  modified_base 14: mod_base = OTHER; note = 2-prime-fluoroguanosine
  modified_base 14..16: mod_base = OTHER; note = Phosphorothioate internucleotide linkage
  modified_base 15: mod_base = cm
  modified_base 16: mod_base = OTHER; note = 2-prime-O-methyladenosine
  source 1..16: mol_type = other RNA
cccttgtcctctcgca

SEQ ID NO: 797 - RNA, 16 nt, synthetic construct
  misc_feature 1..16: note = Polynucleotide
  modified_base 1..2: mod_base = cm
  modified_base 1..3: mod_base = OTHER; note = Phosphorothioate internucleotide linkage
  modified_base 3: mod_base = um
  modified_base 4: mod_base = OTHER; note = 2-prime-fluorouridine
  modified_base 5: mod_base = gm
  modified_base 6: mod_base = OTHER; note = 2-prime-fluorouridine
  modified_base 7: mod_base = cm
  modified_base 8: mod_base = OTHER; note = 2-prime-fluorocytidine
  modified_base 9: mod_base = um
  modified_base 10: mod_base = OTHER; note = 2-prime-fluorocytidine
  modified_base 11: mod_base = um
  modified_base 12: mod_base = cm
  modified_base 13: mod_base = gm
  modified_base 14: mod_base = OTHER; note = 2-prime-fluorocytidine
  modified_base 14..16: mod_base = OTHER; note = Phosphorothioate internucleotide linkage
  modified_base 15: mod_base = gm
  modified_base 16: mod_base = OTHER; note = 2-prime-O-methyladenosine
  source 1..16: mol_type = other RNA
ccttgtcctctcgcga

SEQ ID NO: 798 - RNA, 16 nt, synthetic construct
  misc_feature 1..16: note = Polynucleotide
  modified_base 1: mod_base = cm
  modified_base 1..3: mod_base = OTHER; note = Phosphorothioate internucleotide linkage
  modified_base 2..3: mod_base = um
  modified_base 4: mod_base = OTHER; note = 2-prime-fluoroguanosine
  modified_base 5: mod_base = um
  modified_base 6: mod_base = OTHER; note = 2-prime-fluorocytidine
  modified_base 7: mod_base = cm
  modified_base 8: mod_base = OTHER; note = 2-prime-fluorouridine
  modified_base 9: mod_base = cm
  modified_base 10: mod_base = OTHER; note = 2-prime-fluorouridine
  modified_base 11: mod_base = cm
  modified_base 12: mod_base = gm
  modified_base 13: mod_base = cm
  modified_base 14: mod_base = OTHER; note = 2-prime-fluoroguanosine
  modified_base 14..16: mod_base = OTHER; note = Phosphorothioate internucleotide linkage
  modified_base 15..16: mod_base = OTHER; note = 2-prime-O-methyladenosine
  source 1..16: mol_type = other RNA
cttgtcctctcgcgaa

SEQ ID NO: 799 - RNA, 16 nt, synthetic construct
  misc_feature 1..16: note = Polynucleotide
  modified_base 1..2: mod_base = um
  modified_base 1..3: mod_base = OTHER; note = Phosphorothioate internucleotide linkage
  modified_base 3: mod_base = gm
  modified_base 4: mod_base = OTHER; note = 2-prime-fluorouridine
  modified_base 5: mod_base = cm
  modified_base 6: mod_base = OTHER; note = 2-prime-fluorocytidine
  modified_base 7: mod_base = um
  modified_base 8: mod_base = OTHER; note = 2-prime-fluorocytidine
  modified_base 9: mod_base = um
  modified_base 10: mod_base = OTHER; note = 2-prime-fluorocytidine
  modified_base 11: mod_base = gm
  modified_base 12: mod_base = cm
  modified_base 13: mod_base = gm
  modified_base 14: mod_base = OTHER; note = 2-prime-fluoroadenosine
  modified_base 14..16: mod_base = OTHER; note = Phosphorothioate internucleotide linkage
  modified_base 15: mod_base = gm
  modified_base 16: mod_base = OTHER; note = 2-prime-O-methyladenosine
  source 1..16: mol_type = other RNA
ttgtcctctcgcgaga

SEQ ID NO: 800 - RNA, 16 nt, synthetic construct
  misc_feature 1..16: note = Polynucleotide
  modified_base 1..2: mod_base = gm
  modified_base 1..3: mod_base = OTHER; note = Phosphorothioate internucleotide linkage
  modified_base 3: mod_base = OTHER; note = 2-prime-O-methyladenosine
  modified_base 4: mod_base = OTHER; note = 2-prime-fluoroguanosine
  modified_base 5: mod_base = gm
  modified_base 6: mod_base = OTHER; note = 2-prime-fluorocytidine
  modified_base 7: mod_base = OTHER; note = 2-prime-O-methyladenosine
  modified_base 8: mod_base = OTHER; note = 2-prime-fluoroguanosine
  modified_base 9: mod_base = OTHER; note = 2-prime-O-methyladenosine
  modified_base 10: mod_base = OTHER; note = 2-prime-fluoroguanosine
  modified_base 11..12: mod_base = cm
  modified_base 13: mod_base = um
  modified_base 14: mod_base = OTHER; note = 2-prime-fluorouridine
  modified_base 14..16: mod_base = OTHER; note = Phosphorothioate internucleotide linkage
  modified_base 15: mod_base = gm
  modified_base 16: mod_base = OTHER; note = 2-prime-O-methyladenosine
  source 1..16: mol_type = other RNA
ggaggcagagccttga

SEQ ID NO: 801 - RNA, 16 nt, synthetic construct
  misc_feature 1..16: note = Polynucleotide
  modified_base 1: mod_base = gm
  modified_base 1..3: mod_base = OTHER; note = Phosphorothioate internucleotide linkage
  modified_base 2: mod_base = OTHER; note = 2-prime-O-methyladenosine
  modified_base 3: mod_base = gm
  modified_base 4: mod_base = OTHER; note = 2-prime-fluoroguanosine
  modified_base 5: mod_base = cm
  modified_base 6: mod_base = OTHER; note = 2-prime-fluoroadenosine
  modified_base 7: mod_base = gm
  modified_base 8: mod_base = OTHER; note = 2-prime-fluoroadenosine
  modified_base 9: mod_base = gm
  modified_base 10: mod_base = OTHER; note = 2-prime-fluorocytidine
  modified_base 11: mod_base = cm
  modified_base 12..13: mod_base = tm
  modified_base 14: mod_base = OTHER; note = 2-prime-fluoroguanosine
  modified_base 14..16: mod_base = OTHER; note = Phosphorothioate internucleotide linkage
  modified_base 15: mod_base = tm
  modified_base 16: mod_base = OTHER; note = 2-prime-O-methyladenosine
  source 1..16: mol_type = other RNA
gaggcagagccttgta

SEQ ID NO: 802 - RNA, 16 nt, synthetic construct
  misc_feature 1..16: note = Polynucleotide
  modified_base 1..2: mod_base = gm
  modified_base 1..3: mod_base = OTHER; note = Phosphorothioate internucleotide linkage
  modified_base 3: mod_base = cm
  modified_base 4: mod_base = OTHER; note = 2-prime-fluoroadenosine
  modified_base 5: mod_base = gm
  modified_base 6: mod_base = OTHER; note = 2-prime-fluoroadenosine
  modified_base 7: mod_base = gm
  modified_base 8: mod_base = OTHER; note = 2-prime-fluorocytidine
  modified_base 9: mod_base = cm
  modified_base 10: mod_base = OTHER; note = 2-prime-fluorouridine
  modified_base 11: mod_base = um
  modified_base 12: mod_base = gm
  modified_base 13: mod_base = um
  modified_base 14: mod_base = OTHER; note = 2-prime-fluorouridine
  modified_base 14..16: mod_base = OTHER; note = Phosphorothioate internucleotide linkage
  modified_base 15: mod_base = gm
  modified_base 16: mod_base = OTHER; note = 2-prime-O-methyladenosine
  source 1..16: mol_type = other RNA
ggcagagccttgttga

SEQ ID NO: 803 - RNA, 16 nt, synthetic construct
  misc_feature 1..16: note = Polynucleotide
  modified_base 1: mod_base = gm
  modified_base 1..3: mod_base = OTHER; note = Phosphorothioate internucleotide linkage
  modified_base 2: mod_base = cm
  modified_base 3: mod_base = OTHER; note = 2-prime-O-methyladenosine
  modified_base 4: mod_base = OTHER; note = 2-prime-fluoroguanosine
  modified_base 5: mod_base = OTHER; note = 2-prime-O-methyladenosine
  modified_base 6: mod_base = OTHER; note = 2-prime-fluoroguanosine
  modified_base 7: mod_base = cm
  modified_base 8: mod_base = OTHER; note = 2-prime-fluorocytidine
  modified_base 9: mod_base = um
  modified_base 10: mod_base = OTHER; note = 2-prime-fluorouridine
  modified_base 11: mod_base = gm
  modified_base 12..13: mod_base = um
  modified_base 14: mod_base = OTHER; note = 2-prime-fluoroguanosine
  modified_base 14..16: mod_base = OTHER; note = Phosphorothioate internucleotide linkage
  modified_base 15: mod_base = gm
  modified_base 16: mod_base = OTHER; note = 2-prime-O-methyladenosine
  source 1..16: mol_type = other RNA
gcagagccttgttgga

SEQ ID NO: 804 - RNA, 16 nt, synthetic construct
  misc_feature 1..16: note = Polynucleotide
  modified_base 1: mod_base = cm
  modified_base 1..3: mod_base = OTHER; note = Phosphorothioate internucleotide linkage
  modified_base 2: mod_base = OTHER; note = 2-prime-O-methyladenosine
  modified_base 3: mod_base = gm
  modified_base 4: mod_base = OTHER; note = 2-prime-fluoroadenosine
  modified_base 5: mod_base = gm
  modified_base 6: mod_base = OTHER; note = 2-prime-fluorocytidine
  modified_base 7: mod_base = cm
  modified_base 8: mod_base = OTHER; note = 2-prime-fluorouridine
  modified_base 9: mod_base = um
  modified_base 10: mod_base = OTHER; note = 2-prime-fluoroguanosine
  modified_base 11..12: mod_base = um
  modified_base 13: mod_base = gm
  modified_base 14: mod_base = OTHER; note = 2-prime-fluoroguanosine
  modified_base 14..16: mod_base = OTHER; note = Phosphorothioate internucleotide linkage
  modified_base 15: mod_base = gm
  modified_base 16: mod_base = OTHER; note = 2-prime-O-methyladenosine
  source 1..16: mol_type = other RNA
cagagccttgttggga

SEQ ID NO: 805 - RNA, 16 nt, synthetic construct
  misc_feature 1..16: note = Polynucleotide
  modified_base 1: mod_base = OTHER; note = 2-prime-O-methyladenosine
  modified_base 1..3: mod_base = OTHER; note = Phosphorothioate internucleotide linkage
  modified_base 2: mod_base = gm
  modified_base 3: mod_base = OTHER; note = 2-prime-O-methyladenosine
  modified_base 4: mod_base = OTHER; note = 2-prime-fluoroguanosine
  modified_base 5: mod_base = cm
  modified_base 6: mod_base = OTHER; note = 2-prime-fluorocytidine
  modified_base 7: mod_base = um
  modified_base 8: mod_base = OTHER; note = 2-prime-fluorouridine
  modified_base 9: mod_base = gm
  modified_base 10: mod_base = OTHER; note = 2-prime-fluorouridine
  modified_base 11: mod_base = um
  modified_base 12..13: mod_base = gm
  modified_base 14: mod_base = OTHER; note = 2-prime-fluoroguanosine
  modified_base 14..16: mod_base = OTHER; note = Phosphorothioate internucleotide linkage
  modified_base 15: mod_base = gm
  modified_base 16: mod_base = OTHER; note = 2-prime-O-methyladenosine
  source 1..16: mol_type = other RNA
agagccttgttgggga

SEQ ID NO: 806 - RNA, 16 nt, synthetic construct
  misc_feature 1..16: note = Polynucleotide
  modified_base 1..2: mod_base = cm
  modified_base 1..3: mod_base = OTHER; note = Phosphorothioate internucleotide linkage
  modified_base 3: mod_base = um
  modified_base 4: mod_base = OTHER; note = 2-prime-fluorouridine
  modified_base 5: mod_base = gm
  modified_base 6: mod_base = OTHER; note = 2-prime-fluorouridine
  modified_base 7: mod_base = um
  modified_base 8: mod_base = OTHER; note = 2-prime-fluoroguanosine
  modified_base 9: mod_base = gm
  modified_base 10: mod_base = OTHER; note = 2-prime-fluoroguanosine
  modified_base 11: mod_base = gm
  modified_base 12..13: mod_base = cm
  modified_base 14: mod_base = OTHER; note = 2-prime-fluorouridine
  modified_base 14..16: mod_base = OTHER; note = Phosphorothioate internucleotide linkage
  modified_base 15: mod_base = gm
  modified_base 16: mod_base = OTHER; note = 2-prime-O-methyladenosine
  source 1..16: mol_type = other RNA
ccttgttggggcctga

SEQ ID NO: 807 - RNA, 16 nt, synthetic construct
  misc_feature 1..16: note = Polynucleotide
  modified_base 1: mod_base = cm
  modified_base 1..3: mod_base = OTHER; note = Phosphorothioate internucleotide linkage
  modified_base 2..3: mod_base = um
  modified_base 4: mod_base = OTHER; note = 2-prime-fluoroguanosine
  modified_base 5: mod_base = um
  modified_base 6: mod_base = OTHER; note = 2-prime-fluorouridine
  modified_base 7: mod_base = gm
  modified_base 8: mod_base = OTHER; note = 2-prime-fluoroguanosine
  modified_base 9: mod_base = gm
  modified_base 10: mod_base = OTHER; note = 2-prime-fluoroguanosine
  modified_base 11..12: mod_base = cm
  modified_base 13: mod_base = um
  modified_base 14: mod_base = OTHER; note = 2-prime-fluoroguanosine
  modified_base 14..16: mod_base = OTHER; note = Phosphorothioate internucleotide linkage
  modified_base 15: mod_base = um
  modified_base 16: mod_base = OTHER; note = 2-prime-O-methyladenosine
  source 1..16: mol_type = other RNA
cttgttggggcctgta

SEQ ID NO: 808 - RNA, 16 nt, synthetic construct
  misc_feature 1..16: note = Polynucleotide
  modified_base 1..2: mod_base = um
  modified_base 1..3: mod_base = OTHER; note = Phosphorothioate internucleotide linkage
  modified_base 3: mod_base = gm
  modified_base 4: mod_base = OTHER; note = 2-prime-fluorouridine
  modified_base 5: mod_base = um
  modified_base 6: mod_base = OTHER; note = 2-prime-fluoroguanosine
  modified_base 7: mod_base = gm
  modified_base 8: mod_base = OTHER; note = 2-prime-fluoroguanosine
  modified_base 9: mod_base = gm
  modified_base 10: mod_base = OTHER; note = 2-prime-fluorocytidine
  modified_base 11: mod_base = cm
  modified_base 12: mod_base = um
  modified_base 13: mod_base = gm
  modified_base 14: mod_base = OTHER; note = 2-prime-fluorouridine
  modified_base 14..16: mod_base = OTHER; note = Phosphorothioate internucleotide linkage
  modified_base 15: mod_base = cm
  modified_base 16: mod_base = OTHER; note = 2-prime-O-methyladenosine
  source 1..16: mol_type = other RNA
ttgttggggcctgtca

SEQ ID NO: 809 - RNA, 16 nt, synthetic construct
  misc_feature 1..16: note = Polynucleotide
  modified_base 1: mod_base = gm
  modified_base 1..3: mod_base = OTHER; note = Phosphorothioate internucleotide linkage
  modified_base 2..3: mod_base = um
  modified_base 4: mod_base = OTHER; note = 2-prime-fluoroguanosine
  modified_base 5: mod_base = gm
  modified_base 6: mod_base = OTHER; note = 2-prime-fluoroguanosine
  modified_base 7: mod_base = gm
  modified_base 8: mod_base = OTHER; note = 2-prime-fluorocytidine
  modified_base 9: mod_base = cm
  modified_base 10: mod_base = OTHER; note = 2-prime-fluorouridine
  modified_base 11: mod_base = gm
  modified_base 12: mod_base = um
  modified_base 13: mod_base = cm
  modified_base 14: mod_base = OTHER; note = 2-prime-fluorocytidine
  modified_base 14..16: mod_base = OTHER; note = Phosphorothioate internucleotide linkage
  modified_base 15: mod_base = um
  modified_base 16: mod_base = OTHER; note = 2-prime-O-methyladenosine
  source 1..16: mol_type = other RNA
gttggggcctgtccta

SEQ ID NO: 810 - RNA, 16 nt, synthetic construct
  misc_feature 1..16: note = Polynucleotide
  modified_base 1: mod_base = gm
  modified_base 1..3: mod_base = OTHER; note = Phosphorothioate internucleotide linkage
  modified_base 2..3: mod_base = cm
  modified_base 4: mod_base = OTHER; note = 2-prime-fluorouridine
  modified_base 5: mod_base = gm
  modified_base 6: mod_base = OTHER; note = 2-prime-fluorouridine
  modified_base 7: mod_base = cm
  modified_base 8: mod_base = OTHER; note = 2-prime-fluorocytidine
  modified_base 9: mod_base = um
  modified_base 10: mod_base = OTHER; note = 2-prime-fluoroguanosine
  modified_base 11..12: mod_base = OTHER; note = 2-prime-O-methyladenosine
  modified_base 13: mod_base = um
  modified_base 14: mod_base = OTHER; note = 2-prime-fluorouridine
  modified_base 14..16: mod_base = OTHER; note = Phosphorothioate internucleotide linkage
  modified_base 15: mod_base = cm
  modified_base 16: mod_base = OTHER; note = 2-prime-O-methyladenosine
  source 1..16: mol_type = other RNA
gcctgtcctgaattca

SEQ ID NO: 811 - RNA, 16 nt, synthetic construct
  misc_feature 1..16: note = Polynucleotide
  modified_base 1..2: mod_base = cm
  modified_base 1..3: mod_base = OTHER; note = Phosphorothioate internucleotide linkage
  modified_base 3: mod_base = um
  modified_base 4: mod_base = OTHER; note = 2-prime-fluoroguanosine
  modified_base 5: mod_base = um
  modified_base 6: mod_base = OTHER; note = 2-prime-fluorocytidine
  modified_base 7: mod_base = cm
  modified_base 8: mod_base = OTHER; note = 2-prime-fluorouridine
  modified_base 9: mod_base = gm
  modified_base 10: mod_base = OTHER; note = 2-prime-fluoroadenosine
  modified_base 11: mod_base = OTHER; note = 2-prime-O-methyladenosine
  modified_base 12..13: mod_base = um
  modified_base 14: mod_base = OTHER; note = 2-prime-fluorocytidine
  modified_base 14..16: mod_base = OTHER; note = Phosphorothioate internucleotide linkage
  modified_base 15..16: mod_base = OTHER; note = 2-prime-O-methyladenosine
  source 1..16: mol_type = other RNA
cctgtcctgaattcaa